United States Patent Application Publication US 2026/0258423 A1 - sequence listing, part 67

SEQ ID NO: 301568 - DNA, 83257441 bp, Homo sapiens (residues 59,774,597-61,909,403 of 83,257,441)
  source 1..83257441: mol_type = genomic DNA
agtaagcaatatgtagtagtatatatgacaatagtaatagtagaactttttctttctttgcttctttcttccttttctttgttttgttttgttagtttgtttttgatttagggtctcactctgtcactcaggctggagtgcagtgatagaaacatagcttactgcagcttcaaactcttatataaacatagcttactgcagcttcaaactcttaggctccagccgggggtggtagctcatgcctgtaatcccagcactttgagaggctgaggtgggcagatcacttgaacctaggagtttgagatcagcctgggcaatagtgagaccttgtctctacaaaaaaaattttttttttttttttttgagatggagtctcgctctgtcgccaaggctggcgtgcagtggcctgatctcggctcactacaagctccaccttctgggttcacgccattgtcctgcctcagcctcccgagtagctgggactacaggcgcctgccaccacgcctggctaacattttgtattttgtttagtagagacggggtttcaccatgttagccaggatggtcttgatctcctgacctcgcaatccacccgccttggcctcccaaagtgctgggattacaggcgtgagccaccacgcccggcctacaaaaaattttttaaaaagcttagctgggcctagtggcgtatgcttgtagtcctagctacttgggaggctgagttgggaggatcacttgagcctgggaggcaaagattgcagtgagccctgattgtgccactgcactccagcctgggtgacagaatgggagtatctcaaaaaacacaaagttattccccagcctcaatctctcaagtagctgggactacaggtatataccactatggccagctaatttttatttgttgtagagacagggtcccactatgttgcccaggctggcctcaaactcctgggctcaagtgatcctcccaccctggcctcccaaaatgctgggattataggcgtgagccaccacacctggcctgaactttctttttgaataatatttaacagttcaaactattcagcagttcagacttgcctttgcctcagtcagattaatgaatgccctggagtattctagacagtgtcctcaagatgagcaaggtaaactttcaaaacagaaaaatattaaatgctaggcctaggcaagcagtaacataattggttgaggctttttgacctaatcacaatctgtgtatcagcctctatctcagttatctcaacagagtgttttgttttcaggaaaattcctaaaaaccttgttgaaagattgaatctccatcttcaagtcagataggctttttaaaaatgcattattaccgagaactttgggaggctgaaacaggaggattgcttgaggccagaaattcaagaccggcctgggcaacatggcaagatctcatctctacaaaaaatgaaaaattagctgtatagggtggtgcattcctgtagtccctgctacttgggaggctaaaacaggagcattgcttgagcccagaaggtggaggctgcagtgagctgcatttgcactactgtactctaccctgggcaacagagcaagaccccacctaaaaaaaaacaagaagcattatgaaataaaattcaaccaagtatggttatagtttttaattaaatacaaaactttcaaatatgaatttagaatagccaaatataaaccaaatgaaataaagagccatgaatatctgctctttgtggaaagagcaaattgccctggtatctgctttgccttatctgccaaccaaatattatgcctctcatgacatcataatgcttatattaatgctaataattattacaaatataaacttttaaaattatttttaacattttaaaaatccagtatttaatatgacccttgtgttaactctgagggagtttggaaaggtaccattcttctaactttatagaaaacagtagatttagttgttacttcccaaatttcacatacttataggtagaacaaaaactcagaatgccagcattactggtatattccgattactgaaaccagtctgtccacagaagcagatgggtgagacttgtgacaactgatagttctttgagttatggcactaactaatgtatgtcatttaacatctctaaaattctttttttatctatatgaaatcagcaagttgaagtggaataaatataaggtggcttgcagctatacatttttttgctatgacttggattccaaatgggtatgagagttgttctctcataagtcaactaatgtactatgattatttctccttttgtttttaaacctttttttcttagaattaacattttcaaatttgcatagtctttacatctctggcttgccttctctcccctccaacagccctgtaaaaacatctcatgataccactttccactcggtaacacaaataagattatatcaattccattttttttcatgaagtcatctctctggagccctccatgctcccactccattctggacttgctgttcagttgcccttctgcacagttgcttctgtcttggtttagatttcttgtcttcctctttcttaatttacaccttcgttttgcttgaacatattctgctgtagctttctgtgaaagggtgagtaaatggaaaatgtgataccatacattctaaactagcatgttcttcattcacaattaattaactgaatataggattgtgggttgaaaatcactttttatacttagaatttggaaggcattgttcaattgtcttcaagtttctgtaattggtatccagaggaccgatgcccttctgagtcctctttataagcagtctactttttttttttttcctctctagaagcttttaggttcattatctgaggtacagtctttttaaaatgtattctgagcttggcacagtggctcacgcctgtaatcccagcactttgggaggccgaggtgggtggatcacctacggtcaggagttcaagaccagcctggccaacatggtgaaaccccatctctactaaaaatataaacaaattagctgggtgtggtcgtatgcgcctgtagtcccagctgcttgggaggctgagacaggagaatcgcgtgaaccctggaggcagaggttgcggtgagccaagatcatgccactgcactccagcctgggcgacacagcaagactccgtctcaaaacaaaacaaaacaaaacaaaacaaaacaaaacaaaacaaaaaaacaaataaagtgtactctgataggtgctcagaaaacttgttccttagtttggggaaatgttcttgtattttttatgtgagttttccctctttagtctctgttcttgcttcctggaattctagttgcttcaatgttaggcctcctatgcccatccttttaattttttaaacctttttgcttctaatatttatctcattttactatctatgagatttcccaagtttatcttctaagtcttatatcgaaatgtttttctgctgttaacatatttattttcaaaaagcaatttgtatgtatttttcaggcatcgtcttttctgtttgttcaatttggagttcgaggctttcctcaaagcctgataatccttatttgtatgtttatataagaataaggcacttaaggccgggcgcagtggctcagcctgtaatcccagcactttgggaggcagaggcaggcggatcatgaggtcaggagattgagaccatcctggctaacacagtgaaaccccatctctactaaaaatacaaaaaaaaattagctgggcatggtagcgggcgcctgtagtcccagctacttgggaggctgaggcaggagaatggtgtgaacctgggaggtggagcttgcagtgagccgagatcgcaccactgcactccagcctgggtgagagcgagactctgtctcaaaaaaaaaaaaaaaagaataaggcacttaaaagctaagtggaagctatgtgcgtacaggccaggtgtagtgatggtgaggcttccctattgtacagtcaagtggcatccaggcttaatatttactgagaacctccatgtatcagtgtctattgatcttttcttggggatagttcagtttctccatgatggatccttcaatttcttgcctaggcaatgcagacagtccctaacttacagtggtttgacttatgattgttcacctttacaatggtatgaaattgatacacattcagtacaaaccataggtcgaattttggattttgatcttttccccagccagcgatatgtggtaccatactctcacacaatgccaagtagcagcagtgagccacagctcccagtcagccaggtgatcatgagggtaaacgtccatactctgcagtgtactgtaattttgcccaactatgggctaatgtaagtcttctgagcatgtctaagggaggctaggctaagctatgatgtttggtaggttagatgtattcaatgcatttttgatttacgatatattcagtacgaaggggttaagacacgtcacccgttgtaagtcaaggaacatctgtatcagccttgctgctgacacactaaagctagactggggaagagtggttagagatctccatttagtatgtggactgttgctcaactcactttctgttctatctgtgaatacctacacaaacacaagcacaagtatgtcctgagcccagaacattcacttttgtctagagactatgtctcccactgatatgggagagagacttgcctggctgtgctgagtagggatgggacctgggagtcttttgcattctccttgttttcagacctatgccagcctcttctggcagttctgctgaagagctcttttggagttttgtggggcaaagtattttgcttctcttacatatccctcacctgtacgctctcaggtataatcttttcttctgtttgtcctgtcctcatttattaatgctaacttcatcaaagattgagttctcatttctgttttctatgttttggggttatttttagaacaaagagtattccagttgtgtattactgagtaacaaatcaccccaacatttagtggtttaaactaagaaaagtcattcgtattgctcacagagtgcagtgagtgccttgtttctgtgtgatatctctcaaggatcccatccatagcacaccctacattggctagaatatcagagtagaagacttatttcattctttgcagggttttgattttggaattttaaagaatgaatttcataagcttattgccatctaaaagctcagttcctaaaactaagatcttctagaatttgatgaagaattctttattttatccatgtaatttgagctcttgaagactttgaccatttcttttctcagtctttatctatctactgttggggtaataatctttttctttcatctcttatgtccctgattagttactttttgaggggatcttctctgataccactttttctttgagtcgtggaaaccagaatgcacacaatacttctgttggttatgaggtttggctattttcatcctgtaaagccaataattaaaatcactattttaagataaactgtacatttctcagtacctaatttcatatttgcttatttatattgaaaaatcaagtgagcaaaatgtacacacatactgtttcatgttctttgttagaaatcatatactgttgcctgctgcagtggctcacgcctgtaattccagcactttgggagaccaaggtgggcggatcacttgaggtcaggagttcgagaccagcctggccaatgtggtgaaaccgcatctctaccaaaaatacagaaaattagctgggcatggtagtagtacggtgcttaccatatcatactgtagcaatattttcatccaggttaatgcaataaaaagtgaagaactagttttttcctcctatattggatttttcgtgttgtttgtttttgtttttgttttttgttttttgttttttttgagacagagtttcactcttgttgcccaggctggaatgtagtggcgccatctcagctgactgcaacctctgcctcctgggttaaagcaactctcttgcctcagcctcacaagtagctgggattataggcgtccaccaccacgcctggctaattttttgtattttcagtagagatgggatttcaccatgttggccaggctggtctcgaactactgacctcaggtgatccacccgcctgggcctcccagagtgctgggattacaggtgtgagcccctgtgcccagcctgatttttcttttcttcattccttttcatgattttttcaccagtttccatcaattttgtggcttatgatagatttcagtggatgtggatataattttccttacatactttttcccagtttcagataaggtgtataagatttttaatttttatttgtttatagttgttttgcagttgaaggggtgagggagaacaagtggaaagagactgttgccggttttccatgttataaattatctgagagagtactaatgttttaattcttgttcaaaggagagtttcttgctatggcttggcaaagagaagatttttaatgctttcaatcatgaatttgttttaggccctttgcttattttatgttttacagatctgcatattttttaattatacaagtaattttagtaataagattcttacattccaaaagtattataaagtaaaaagtgaaagctcacacaccttctccccagtgtagggtaataatcactgtattccagactgctttctttgcatacataactttttataaaaattagaatcataccataaattttagtcacaagttcctttttcacagtatcatagacatgtgataccaatgttattataaaattattttttattacgaagtgatacatctcattgtagaaaattggtgagtgccctttagtcttttctctataaatatttatatacctaagagtgaaatcatattgtttgttgttttgtgacttgatttgaatctaaaaacgtgaacatttttccacgccatcaaatattttcacatctttgctataacgggtttttttcttactacaaagtaagtttattataatgaaatgctgaaaatacaaataaagaagaaatagaatgttcatctaacaggtgcatatatcttttttatgatatatttttcattttcttactggtttacatatttaagaagatgctctttgtcatatgctgccagtattattccttattcccagtagtttttccatgtcatttactgggtatgttttgttacatgttactttttttagacagagtctcgctctgtcgcctatgctggagtgcagtggtgtgatcttggctcactgcaacctctgcctcccgggttcaagtggttctcctaactcagcctcccaagtagctaggattacaggcacatgtcaccacgcccagctaatttttgtatttttagtagagatggggtttcaccatgttggccaggctagtctcgagctcccgacctcaagtgatctgccagccttggcctcccaaagttctggaattacaggcatgagccaccgcacctggcctgtattttcttttagtacttttatggttttattcttttaagtctttaatctatgaaaatatttttacatatgatatgatgtaggaatctaacttttttctttcttaggtaattaactaattgtatattgttccaacactattttccaagtgattttaatatgttagttttgtcttatattttgttgttctaatttgcatcttttttcctattatatttttataaatgttagaaatggtatattaaaaagatactgggttcttatttgctaagctataactttactgacatctttctagtcacatcttattggttatgatttacaaattcttatagtaatcagtttagcaaagattcaaagtttatctgactttgttgctgggatctgctcgtagataacatgtatttggtaaaacctccaatttgatagaagcaataaaatacggaaaagttgaatcaactgtagctaaaacggcaaattaagtaaaatcaatccgtaactatgagtggaaatttaaattttaagattgcatgagaatgagttagaaaatatgggtttttatttttgaaggtaaagccctgtagtagagtaagtttatcagccaaaaaagtaaaaacaaacaaacaaaaaaaaccacttggctttcattgctttgccatgtgctttccaactaggttaaatggtgtatgtgattttactaagaaattgttgtggccgggcgcgatggctcacacctgtaatcccaacacgcccaaggcaggcggatcacgaggtcaggacatcgagaccatcctggctgacatggtgaaaccccgtctccactaaaaaatacaaaaagttagccgggcgtggtggcgggcgcctctagtcccagctactccggaggctgaggcaggagaatggcatgaacctgggaggtggagctagcagtgagtcaagatcgcgccactgcaatccagcctgggcgacagagcgagactctgtctcaaaaaaacaaaaagaaattgttgttatgaaacaattttatttacttaaattccattcttgactaatggttggatgtcgtactatagatgttttaagggggaaaaaagatgattaaagcatttatttgtattctgatttattatgatacctgctgtatttttgtgagtacaatgttgagattaggcagtatttttccactaagctgacttccttttgctcttggctttctatcgtgtttccactagatgtctgtgagaggtacacatgaatgaatgtagcttcctctgaccttgagcaattttagcatcattaataaaagttaggtctagatagctgtttatgtgctttgtggactgttttatgcaaggtttaattattctctttatgatcttcttttccttctttgttcctgtgttctgttaatgctatcaccatcctaacaatcgctttgggtcaaaatctgagtcatctgactccctcctttcctcccatccccagtaattaattctttaaggcctgttgattctatctccatagtatcttacatgccctctcttctcccttcccgctactgtttcaggcctttatcaacccttacctaaatattgccagcagcttgctagtaggtctactctttactagttttttatcccaatcttttcccacacaaagtaacaaaaataattttctgaaaaatatctctacttatgaaacattgctgctcaaaaatctgtgatgcctcccactgtgtatagagtgaaatctaaactatttaacccagttttcttcattacttggccccaacctacgactacttctgatttccctttaacagttttttatcctctgtattgatggttttcaagttgaactttaaaaaactgccagaatacccatcaaaaagagtgtgtgtgtgtgtgtgtgtgtgtgtgtgtgtgtgtgtgtgtgagagagagagagagattggagggaggaagggagagggagagagatttcttttaattaaagaactctgaagtttttaagtttaaaaattactagcctgatcatttggaataatttaactttttcctccaccactatgcggtattgttctttttcgtaactttgcctagtgtgtcatttcttcccatctgcatgtctactttttcagttttcttacctttcaatttatgtgctgctggcttctttgtgaactattttatgattcccttcctacccctacctcacccccttcactcctctcaaattgtctctgaattcctatctcagcccagctatgtctttcttgtgtcacttatcacattctaccttcttttaaaactatttatagacttttcttatctctccaggagtctaaactccttaagaagggggcttaaaaatgtttgtattttcaacaatgcctgcctactgttacacatactactcatgcagtggatactttgaatagatgatgaaataacagtaagaaaaagtgtagcattacatgaaacatgtccattaatattcagtcttattttgctgtaaaatgtaattgaacaacagtaattttacaaagaaaggaagatttaactgtattgcatctttgagtttaatagtcatctgagagcaattgtcatctgaagataatataaaagacaccaagttaaatgacttgcaaatttttttactttttaaaatttttttatttttttagacttgcaaattttaattcacattgagtaaaacaacttttgtaaaattatatactttagaaacaaatgaagattcttgtgacttgtttattctataagctgtataaccaaaaagaaaaattaaagatactttaggaataaaataatttgaaaaataaaagaacttatttgcatgatgtatcctgaaaaattagggcagccagtattactgaaataatggaggagtccgggagtggttgtggtatttttgtatttaaagcttacacaatagagtagaaacgttgtggtacatatttacttacaagaatatgttttgaataagtttactttcctaaatgtcatctgttttaatgacctgctacttggattctttctcacagtgttaggttgctgactatgtgaaatttcctacttcttattattgctatcagaataggaaatttaaaattaaatcagaaatgtaaaagtcttaaaacttcaccttttcaaagaatatcggggcctggcatgatgactcatgcctgtaatcccagcactttgggaggccaaggcaggtggatcatttgaggtcaggggctaaagaccagcctgaccaacatggtgaaaccttgtaaaaatacaaaattttttgtactaaaaatacaaaaattagctgggcatgatggcaggcatgtgtaatcccagctacttgggaggctgaggaacgagaatcgcttgaacccgagaggcagaggttgcagtgagctgagatcacaccactgcactccagcctaggtgacagagtgagattccatctcaaaaaaaaaaaaaaaaaagataaaaaagaatatcagtttttttcctctattttcatatcaattagcttgtctttctgttgagtatcgttcatgagtctgccgaccattttaggttgaatatttcctcaaaggctattttatagtttctgaatttaatctttttttaagggaacatttttaggttctatttaggactatagtaattaatgtaattaataatcaataattgctacctactctgtatgttgaagctaaatccccaaattaagttttaatactagtatcttttaccttactaatttctattaaatttaaggctgaaaaaaatcttattttttagcttaataggatctttgtcctattcagaagttttgagttatttacattattttactagtgaaaatataaaaccaaaaaacagtttattagttgtaatggtagttctcattcttatggccaatgccttttttttaatgcagtaaaacaaaatagacatttatctagcgaacatcccttttcaaactatagggtcaaagtgaaggattcttttgataatgatagaatatgtgtttgatcatttgagtttaaagactatgggaaaggaattgataagattatttaaatactcacgaaagtgctttggcattccactaatgctattctcttttaagcacattttcctatgaagtgtgtgcggttgcagttgcctacaccatgtcaatgcctgctggtttttcctgctgtgaagtttttcctttacatacacagattcatgaaagagtttatggtgtagatgatctgaaactaaacaggacacattttcatacactttagtaccatttgaagactctgggtgtcagttgttgctgggacctgtttttgactctgatgaacctttactggttgtggtttgtctggccatcacatgacttctctgaaaattccccctccccttcatttccagtaaactgtttgagcaggagtgagtcacagtgaaaccagcttccctgtaaccacagggcttgttaaagaatttgtcagcgtggactctagagggtttgcattaagctttgcagtaactgttatggtttgtgttgcgtcaggagttccacagaaaagcttcctgcttgcaggatctcttgcttgtttgcaaagagttaaactgatcaactttaccatagtgaacatgagagacacatgttaaacacacttctttatcattaaaggcgttgtcaaaactaccaagaattagtgtagtttctcttttcataatcaaccaaccacacccaataatgtttagtttttgaaaaggcgggcctggtagatagtctttcacagttggctcatgattttatcacaaagtaccatcaaaattaagcaattttaagtggtcttgatggattctgttacaggatattttgactattcgcacagttaggtgtcggtaccaaaggtcacttacttgcactttgttcatcaagaaaaggtagcacttagagtaattctggagttgtgatgtctaagcacacttagcatgatttatagtggaattcttcgtgcccccttttacttgctttctctagaagcatttactttattttgaactcttttgccacctcactcgcagactttaatctttctcccttttaatttcttctatttctttaactcattcccatattatcaacaaggaaagatagttgcaatgtgatgcaagctgttaaatgaatggccagtgggaaacttgtcttctcaacatacattcccaagtgcatttctttttacatgcgcatttctgtatttagccttgtcacctttagctagacttacttatctaaaaaataaatttaggctgggcacaatggctcacgactgtaatcccagcattttgggaggctgaggcgggtggatcacctgaggtcaggagtttgagaccagcttggccaacatggtgaaaccccatctctactaaaaatacaaaaattagtggggcatggtggcaggtgcctgtaatcctgctactcaggaggctgaggcaagagaattgcttgaaccagggaggcagaggatgcagtgagccgagatcgtgccactacactccagcctgggtgacagagtgaactttgtctcaaaaataattaattaattagttaattaattaatttagtgaaaacttttaaactcgacctcctaaaaatttcttttattcggcttacacttttgtaacaaaataagaaaaacattctaaaaaatgtggaagctagttattcctcacaggaaaaaatatacaataatgaagtttgaaattgtttatgttttagccatgctgtcagtcatcaaactaaatttaaaaaaattatttgttttgatgacaaagcaattatcattgaaacaagatgattttcaaatgaaaatacgaggttaatgcagtccagtcattagcagggaaaaaaagaataaatatttaaggtttttcttgttaggttgctttgcacattggagtagaaaatagttttgggcttggcgcgttggctcaggcctgtaatcccagcactttgggaggctgagggggacggatcacaaagtcaggagctctagaccagcctggccaagatggtgaaacaccgtctctactaaaaatacaaaaattactcaggcatgttggagagctccggtagtcccagctactcaggaggctgaggcaggagaatcgcttgaacccgggaggcgtacattttagtgagccgagatcccaccactgcactccagcctgggtgatggagagagactcagtctccaaaaaaaaaagaagaaaaaagaaaatagttttgtggctgggcatggtggctcacgcctgtaatcccagcactttgggaggccgaggtgagcggatcacctgaggtcggaagttccagaccagcctggccaataatggcgaaaccccgtctctactaaaactacaaaaaaattagctgggtgtgctggcgggtgcttctagtcccagctgcttgggaggctgaggtaggagaactgcttgaacccagaggcagaagttgcagtgagctgagatcacaccactgcactccagcctgggcaacagagctagactccatctaaaaaaaaaaaaaaagaaagaaagaaaataattttgtgttatgtctgcttgttcttttcacttccacacctgtttgcagatatggcggtggaaaaagcactgggtaagcattaggttacctttgttaaactaaagtctttttttttttttcaggtttgtgtttcaaacaccttttataaaatgcctttagaaaggccccttttgggccgggcgccatggctcatgcctgtaatcctagcgctctgggaggccgaggagggtggatcacgaggtcaggagatcaagaccatcctggctaacacggtgaaatcccgtctctactaaaaatacaaaaaattagcctggcgtggtggcacgcacctgtagtcccagctactctggaggctgaggcaggagaatcccttgaacctgggaagcagagattgcagtgagagaaaaaaaaaaaagataaaagaaaaaaaggccccttttggctgggcgcagtggtttacgcctataatcccagcactttgggaggccgaggcgggcggaaccagtctggccaatatggtgaaaccccatctctactaaaaatacaaaaattagcccggcgtggtggctcgcacctgtagtcccaattactcgggagactgaggcaggagaatcgcttgaacccggaaggcggaggttgcagtgagccaaaatcgctccactgcactccagcgtgggtgacaaagcaagtctcaaaaaaaaaaaggccctgtattgaaacttggaccaacagactacttacgcttcgtttttgcttatgagtctgtaaatcagtaacatgctaaatacaaacccaccctttgttataagtgctgagtgctttgaggggtacatcagagtttaatggaagacctggacagcagaatagctattatgttcatttcctattgcaaaggtgcctttatttctaattagccaagatattttgtttgtcatgatcaatctgcagttctttctctttcttttctttctttcttccttccttcctttctttctttcccttttttttttttttttttttttgagacggagtctccctctgtcacccagactggagtgcagtggtgtgatctcagctcactgcaacctccacctcccgggttcaagcgattctcctgccccagcctcccaagtagctgggactacaagcacacgccaccatgcccggctgtttttttgtatttctagtagagacagggcttcaccatattggccaggctggtccggaacacttgacctcaggtgatccgcccacctcagcctcccaaagtgcagggattacagacatgagccaccgtgtttggctccaatctgcagttctttcttgcttattatttaaggagatttctctcaatagagtctccttcccatttttgctatctcaggtcttacaacttcaaaatatgactatcatgcttttaaactaaggccctatgaagagatctaaagaaatgggcatgataattcattcagtgctcccctcaaaagtagggatatattttagatttttttgccccattccctgacatgggtctgcatcaattaacttatccaaatttctaaaactttgtatttttactacttgtagtaaagactcagtaagtttatagcccatcatataaagcagtgcttccattttgttttaaatttacctctctgaaggtataaagtttggccaggcgtggtggctcatgcctgtaattccagcactttgggaggccgaggcaggtggatcacttgaggtcaggagtttgagactagcctggccaacatggtgaaactccatctctactaaaaatacaaaaattagccgggcagtagtggcatgtgcctgtaatcccagctaccggggaggctgaggcaggagaatcacttgaacccagggggcagaggctgcagtgagccatgatcacgccactgcactccagtctgggtgacagggcaagctccatctcgaaaaaaaagaaagttttaaagtttacactcaaattattctgatattgtaaaatttgtcaaatacttctcatttcctctcatatttttcatagctttatagatttcacttagcttcctcttcaagcctttctagagaatgtaattattcactttttatatccaacagcccccaaatctcaattgttttttccatggatctttatctaatccttttatatctctcctagcatgaaatcataacttcgcatgatgaaagtcacaactgcacatgattttccagaggcaattgccacataactgtactcatttttcatatttctaaaatcatgggcctgtttagcaatgcattttgctgacatttttaataaacaatttaagactgctcccagttccctttttttttttttttttttttaagatggagtcccgctcttgttgcccaggctggagtgcaatggcacaatctcggctgactgcaagctccacctcccaggttcaaacgattctcctgcctcagcctccagagtagctgggattacaggtgcctgccaccgcgctcagctaatttttttatatttttagtagagacggggttttagtatgttggccaggctggtcttgaactcctgacctcaggcgatccacccacctcagcctcccaaagtgctgggattataggcgtgagccaccgtgcccggctcttttttttttttttttttgagacagagtctcactctgtcacccaagctggagtgctcactcctctgcctccctggttcaagtgattctcctgcctcagcctccctagtaactgggattacaggccaccacgcccggctaattttgtatttttagtagagacagggtttcaccatgttggccaggctggtcttgaactcccgacctcaaatgatctgcccaccttggcctcccaaaatgctgggattacaggcatgagccaccatgcctggccccattgttttatatttaaataaattttccccaaacattttatcttgccgttgtctgtattgaagatgacctgccacttgcttgctgaagtgtgcaaaatctttcagtttactgtcatgaatttagcatctcctagtttagatataatttcaactgtagatttggaacttaaactctgcatttctttttccagggccatttataaatttgttaagattggttctattggccgggtgccatggctcatgcttgtaatcccagcattttgggatactgaggtaggaggatcacttgagccaaggagttcaaggccaacctaggaaacatagtgaaaccccatctctaaaaacaaaaaagttaaaaaattaatcatacatggtggcatgcaactgtagtcccagttacttggaaggctgaggcaggaggattgcttgagcccgagaggtcatgattgtaatgaactatgatggcaccactgcactccagctagacggcagagcaaaagtctgtctcaaaatcaaaaaaagattggttctacctcagaaaagaatgtcactgttgacatttcccataatagagaagttcccatttatctttttcctttgttttcagtctcttaagtttcctgtctctgacagttttgtgaattccatacagacttagttttcatagctttgcttgcttaagtcaagttacctcactattttgacttttttctttttttcttcacagactagtattattgttatgttttatacatagcagattgtcatctactgattttttttatttcagtttgatctaaataattatcagatgaggctgggcacggtggctcatgcctgtaatcctagcactttgggaggccgaggcgggcggatcacctgaggtcaagagttcgagaccagcctgaccaacatggaggtctgtactaaaaatacaaaattagccgggcacatgcctgtaatcccagctactcaggaggctgaggcaggagaatcgcttgaacccaggaggcggaggttgcagtgagccgagatcacgccattgcactccagcctgggcaacatgagcaaaaacgccatctcaaaaaataataataataataataataattattattattattatcagatgagtggctgggcatggtggcttatgcctgtaattccagcactttgggaggctgaggtggaaggatcacttggagcccaggagttcaagaccagtctgggccaaatagtaacacctccatctcttttttttttgaggcgagttttgctcttgttgcccagactggagtgcaatggcacaatcttggcttaccacaacctctgcctcccgagttcaagcaattctcctgcctcggccttccaacgtgctaggattacaggcatgtgccaccacacccagctaattttctaattttttttttagtagagatggggtttctccatgttggccaggctggtcttgaactcccgacctcagttgatctacctgcctcagcctcccaaagtgctgggattgtaggcgtgagccaccatgcccagcctctattaatttttttaaaaagaattttcaaaaattgtcatatgaggagttactggcttcagacaggaaaaagaaaaaggaaattacttgtgtaatatatccgtttacttatttctatgcagtaataaatcttgcatactcagatattttccctgagtgtctagagcacttgtccttcttgggctacagagtccgttcttatttctagtaggagttaggcaggcacccacctgagtttgagtggatgccagctgcctaagaattaccatgtttgtgcgtgtgtgcacgcgtgcgcatgtgtgtgtgtgtttatttatttattttttttgagatggagtcttgctctgtcgcccaggctgaagtgcagtggcgtgatattgtctcactgcggcctccacctcccgagttcaagcaattctcctgcctcagcctcctgagtagctgaaattacaggcgagcaccaccatgcccgtttaatttttgtgtttttagtagagacagggtttcaccttgttagtcaggctggtctcaaactcctgacctcgtgatccgcctgcctcggcctctcaaagtgctgggattacaggcgtgagccaccgcatttgccctttttttgtttttcaagacagagtcttgctctgttgcccaggctggagtgcagtggcacaatctcggttcactgcaagctccgcctcccaggttcatgccattctcctgccccagcctcccgagtagctgggactacaagcacctgccaccacgcctggctaattttttgtatttttagtagagacagggtttcaccgtgttagccaggatggtctcaatctcctgaccttgtgatctgcctgcctcagcctcccaaagtgctgggattacaggtgtgagtcaccgcacccggcctttttttttttttttttttttgagacagagtctcactctgttgcccaggctttagtgcagtggcaagatctcagctcactgcaacctctgcctcccgggttcaagcagttctgccttagcctcgtgagtagctgggattacaagcgcacgccaccacgcctggctaatttttgtatttttagtagagacggggtttcaccatgttggtcaggctggtcttgaactcctaacctcatgatctgcccgcctcggcctcccaaagtgctgggattacaggtgtgagcccccgcgccctgcattttttttttttttttttttttttttttttttttaacgaaaatctaagtagggagagagacagagggaaaggaagctgcagatactggccaatcttaatgctggtaactgggctggaataagaaaaggagggcgagagagcactgtatgtttgtgtgaacttctaagaataatttacttactttatatctgaacatggtaataaatactggagtcagcccccgagaaagcctcctgaaaccgtatttcttccatctcatctttcttcctagactatacaagaaatgttttatgtctagtaggttgtttgtgagttttaagattagtaatcatagtgaaataatcattacaggtgtaaataactgaacaatttcctcctaaagaacaagcattcaggagaagtaatagcacccatttctaccttcttgtgttgaaggatttggtaaactaatcgttggcactaaaaggcagatttgatctttttttttttttttttttgagacggagtttcgcccttgtcgctcaagctggaatgtaatggcgtgatcttggctcaccacaaccttctcctgcctcagtctcccaagtagctgcgattacaggcatgcgccaccacgcccagctaatttcgtatttttagtagagacggggtttctccatgttggtccggctggtctggaactcccgacctcaggtgatctgcccacctcagcctcccaaagtgctgggattacaggcatgtgccaccatgctcggctgagttttgtatttttagtagagatggggtatggggtttcaccgtgttggtcaggctggtctcgaactcctgacttcaagtgatccatccgcctcagcctcccaaagtgctgggattacaggcgtgaaccactgtgcctggccgataattttttgatttttgatatattttccttctttctctcccttccattttacagcccccttacatctttgatatgaacatgtttcttttgttttttaaaattaaaaacaatggtcgggcatggtggctcatgcctgtaatcctagcactttgggaggcctcccaaaggatcagctgagctcaggagttcaagaccagcctgggcaacatggtgaaatcctctctctaccatttaaaaattataaaaataaaaaataataataaaatttaaaacaaaacaaaaatctcttattttcgttgtaagattgcagtagtaattgtgcttatcataaggtctgattgagtagataaaataaatcaggcaagatattttacttcattgggtatcaggtgttttttgtctcttgacatttactaagcagtataacttcaatttaaacaattttgtctcatactcagttttgtttatggtggtagacattattatcatcattttacagaaaagatgaacaaactgcgattcagagaacctaaaagatttagtgttatcaatgctgtgtcattttaatatcattaaaaaccatagaattgctggtgtttgtattgtttctctctatagcactttttatctttcttgtttttgctctctcttgctttgtaggtttcatccatccttctttcatcttcccttttacttactgcaccctctgcttccatacacataccctaaattaggtatctcccaagggaaaaaactcgccagaactctcttctcatagattgtcagcatgacctactctctcacctccttgagaattttgatgttttggatcaccttttctctgaagcctttcctgactgtcctatttagttttcatctcctcccactagaatataaactccatgaggttccagattgttatcagtgtgatttagcgttgtgttctcaacttctacaatatttggcatgtagtaaacactttttaaacatatacggaatgaatgtatgaacgaatcactatgttctcatctttggattctttattaccttgcacatagtagttatcaggtttattcagttaaatgtaattgcttttaaataagaattctgatttctgaaaaaggtttcaattttgtcttcccaaattgagtgtgcacaaaaagtacatttttttctaagcaattatctctgttttcctaaggaaattggaagtaactttcaaaatgttataagttgtttttctaaaacttagcatttaaaatatttaaagctattcattcctcgttttcttgctttaacttactcaatcctcatgctaattctgacaaacacattctttagaaccatctgtacaaaaggaaaatcatttagatttttttcaattgacagttattatcagttggcaaaatggaagcaatattaagaataatttgattgacagtcacttttggaaactggcactgtctactacagttaaacatacacatactgtatgatccagcaattccatttgtaaatctatactcaccagaaggatatgccagaagacatgtacaagaatgttcatagcagcattatttatagtaactcaaaatttccttcctgtaggagatagcttaaaaaggaaaaataaggcctggcactgttgctcaagcctgtaatcctaccactttgggagagcaaggcaggcgggtcacaaggtcaggagttccagaccagcctggccagcatggtgaaaccccccccccgtctctactaaaaatacaaaaattagccaggcattgtggcacacgcctgtagtccgagctactggggaggctgaggcaggagaattgattgaacccgggagcagaggttgcagtgagccgagatcacgccatgccactgcactccagcctggcgacatagcaagactctgtctcaaaaaaaaaaaaaaaagaaaaagaaaaagactttttaaataatagttcaaaagcggaagcaaccctaatgtccaccaacaatagaataaattgtgatatacctatacaatggaataatatgtagcatctgcaacaaattgattactgctacatgcaacagcatggatgaatcacctggacataatataatgttaagccaaagaagccagacataaaagaggacatactgtataattccatttatataaagttcaggccaggcacagtggctcacgcctgtaatcccagcactttgagaggccaaggcaggcagatcacctgaggtcaggagtttgagaccagcctgaccaatgtggtgaaaccctgtcgttactaaaaacatacaaaaattagctgggtgtggtggcatgggcctgtagtcccagctattcaggaggctgaggcaggagaatcacttgaacccgggagtaggaggttgcagtgagctaagatcgcaccattgcagcctgggcaacaagagcaaaacaccatctcaaaaaagtaaaataaactatgataaaataaatttttaaaacgaagttcaaaaataggaaaagctaaatctgtggtaatggaagccaatgttagtggttattttgcagggagtaattactaggagtgccaccagcagggtttctggagttccggtaatgttctgtatctggatctcagtagtggttacatgggtgtgttgtaaatttccattaagaggtatattttagatttgtatgctttactgtatacgttatgccttagtttaaaaaactactcatactgttttctcctgcaacctgcccatgtaaatttggtaacggaaatacatctatacatcgagaaatccacttaatcctgatcttgacccagaaatagttgatagctccctatttttggcacaacactctgaaatgtgtggtgttcacagtggattatgtatttcctgtgtgtatacatgaaaaaaatttgtgttgatcagttctcacgtaacttttgaaaagtgtaatttggataaagcatcatgagacctactacagtcacagctgcctctagatcaatgacttttttacttctttttttaaactgtagccaacaatacaaaatacattgtacttagcaacccagagccaatttgtgtgtaactagaataaatgtttcgtgaaatagtatttacttccattgcttgtgaggtctcaccattttattctgttcattaaaacacaagatgtaaggccgggcacggtggctcacgcctgtaatcccagcactctgggaggccaaggcaggcggatcacctgaggtcgggagttccagaccagcctgaccaacatggagaaaccccgtctccactaaaaatacaaaattagccaggtgtggtggcgcatgcctgtaatcccagctactcgggaggctgaggcaggagaattgcttgaacccaggaggcagaggttgcagtgagccgagattgtgccattacactccagcctgagcaacaagagcgaaactccgtctcaaaagaaaaaaataaaaagaaaaagcaagatgtaatttgttaccaactaaattttcacaccgcattttaatttaatgaaactgccctagataatataaatatgagtataaacagaaacccaaactgaattttgttttcagatttctagttacatctagtttttgagtacttaataaatttagctagttgccaaaataaatgtttcttactgtttcagagaatagtcagatccttctttgcttctggtagtttttagttatgcctgcattgattttgatagatatgagaacttatgtttatattgcatgttttacatataatctcttcttaaaacttctaaatctctaagttactttcagaataaaatatccttgcttttatgaaatgtgttcatgtgatgtattctgcttgcagtattatagagttttaccctaatttctaatatatatagaaataccagtgaccatctctgattttacagttggctttatctaaccgtgtaagccatcagctggatgttaaaacgtttcattttcaggaatagttacacaactcagttctcatcactttttgttcttaaatgggtttgcattttgttatccaacatcttatagctagtaatttaaaatttattaactattttctttgttttacaatcactttatttcaacaatatccctacttttttggtaattctagaatttatttcctaaccacagtctttatcccgtgaccttattatgttataattcaataacaataaataatgtgtgacttaaaaatatgcttcacttggccgggcgcagtggctcacgcctgaaatcccagcattttgggaggccaaggcgggaggatcacctgaggtcaggagtttgagaccagcctggccaacatggtaaaaccccatctctactaaagatacaaaaattagccaggtgtggtggcaggcccctgtagtcccagctactcgggaggctgaggcaggagaatcacttgaacccgggaggcggaggttacagtgagctgagatcctgggggataagagtgagacttcctctcaaaaaaaaaaaaaaaaaggcttatttaaagaggacctactcaaatatgcaaaattaaaatataagcaattactttagtgatattgttgaggaagtcaacagtaagaatattttgttcactttgaattcaattaatgctctatatttttaaaataactcaaagagccctgataatgggtagaaaatagttattaaggcactttttactttgtgttcaagaaagatttgaagttataactgcattacagaaagttttacattgcagtttctataaagataatagttaattgtataatgtatttcattttagaaaatatttaatgatacgttattagggtcttaataacaagttattgtttcagactcattgtctactatgctgaaaaaacttaaattattaagtcatcatgacaagtcattccatttctgcttaatagagttttcattgcttggcgtgcatatttgactagcacgcagaaaccagcaagtaatttttaggtggcacaagagcttcacaaatagactatattttaacataaatttccattacacatgaggaatcagtattgaaacagttgctctgaggcttttaatattggctgtgaaatcacttcagctccaaatccaaaagaaagcattattagctcagtagttttaatatatacagtcatatgccacataacagcctttcagccagtgatgaactgcatgtctgacagttcataatggggctgaaaaattcccatcacctagtgacatggtaatgtagcacaacacattactcacatgtttgtggcgatgctggtgtaaacaaacctattacgctgccagtcatataaaactatagcacatacaggctgtgcgcagtggctcatgcctgtagtcccagcacgttaggagcctgaggtgggcagatcacgaggtcaggagttcgagaccagcctggccagcatggtgaaaccccatcttaactaaaaatacaaaaattatctgggcctggtagcgcgtgcctgtaatcccagctactcaggagggtgaggcaggagaattgcttgaatccaggaggcagaggttacagtgagccaagatcgtgccattgcaccccatcctgggcgacagagcaagactccatctcgaaaaaaaaaaaatatatatatatatatatatatgtgtgtgtgtgtgtgtgtgtgtgtgtgtgtgtgtgtatggcacatacagttatatatagtacataatacttgatagtaaatgaaatgtgtcattggtttatatatttactatactatagttttatcttttgtgtgtgtgtatgttgaagggggagatcatcttgctctgttgcccaggctggagtgcaggggtgtgatcaccgcccactgtagcctcaacttcctgggctctggcaatcctcctgcctcagtatcccgagtaactgggaacacagacttgcatcaccacacccagctaattgtttttttttttaattagttatagagacttggtctccttatgttacccaggctgctctggaagtcctaggctcgagtgatcctcccatctcggcttcccaaattgttgggattataggcatgagccactgtgcctggcccaaaatatcttatataccatattgtatttgtaccttttttatatttaaaaacatatttaggccggatgaggtggctcatgcctataatcccagcactttaggaggccgaggcagccggatcacctgaggttaggagttcaagaccagcctggctaatgtggtgaaaccccatctctactacaaatacaaaaattagccagatgtggtggcaggtgcctgtaatcccagttcaggcaggagaattgcttgaacctaggaggcagaggttgcagtgagccaagattgcgtctttgcactctagcctgggtaacaggagctaaactccatctcaaaaacaaaacaaaacaaaacaaaaaacatatttaggccaggtgtagtgactcacgcctgtaatcccagcactttgggaggccaaggtgggcagatcacttgaggtcaggagttcgagaccagtctggccaacatcgcgaaaccccatctctactaaaaatacaaaaattagctgggcatggtggcacgcacctgtagtcctaggtactctggagtttgaggtgtgagaatcgcttgaacccaggaggtggaggttgcattgagccaagtcacgccactgcactccagcctgggcgacagagcgagaccctgtctcaaaataaaataaataaaacaaaataaaataaaaacatgtttagatacacatatacttacattgtgttacaattgcctacagcatttagtacagtaacaggttgtgtaggtttgtagcctaggagtggtagctatactagatagcctaagtgtgtagtaggctatataacatctaggtttgtataaatacactgcatgatgttcacacgacaatgaaatcgcctaacaactcatttctcagaatatatgccagttgttaagccacacatgactggaatgggttataaaggcaggtaatttaaacttccataacatattaaccaagtatacatttatcttcggtaacattgcattggttttacatgtttagggattttctgttgcttttatttcatttttttatgtcgcccaggctgtagtgcagtggcacgatctctgctcactgcaacctccgcctcccgggttcaagcgattctcttgcctaggcctcctgagtagctaggattacaggcgccagccaccacgcctagctaattttctgggtttgctttgtttgtttggttttgagaaagagtttagctcttgttgcccaggctggagtgcaatggcacgatctcggctcaccacaacctctgcctgccgtgttcaagcaattctcccacctcagcctcccaagtagctgggattacaggcatgcgccaccatgcccggctaattttgtatttttagtagagatgacgtttcttcatgttggtcagcctggtctggaactcctgacctctggtgatccacccgccttggcctccaaagtgctgggattacaggcatgagccaccgcatatggccttctgttgcttttaaagagatcttttcatatggcttcctcgtgaaaatgaaaatgtttactgttactgtttgaagataaaagttacttcgtatatttacattcatgttgacatcattagattcaaagatcaatattttgcagactgttattagccttgtagtttctcttctctctcaatcataaatatctttcttaagaaaaagaaatgtgaagcaacaatggtacaggcatattcatagtttaaggctttgtctttctgtatttaatcttgaaattcagtgataaggaattgctgtgacttttttttattagtcttgtagtgcttgggaaaatgtttcttgcgtctcctgtttcagaagcgtgattggtttacatatataatcactatgggttgtggtaggaaaggtaatttatttacctataattggttttatttttgtgaaaaaagaaaagtagaaaatgatttgtaattgctaattgtaaatgcatgcttcatatttaagtagacttagagaatgaaactatcatctcaggcacttaagttgtgaaataggtaaaagttgtgaaatgtaaatacagagaaatggaactaataaaaggtgtttgtttttagtttatggatttttgaaaaagtgaaaaatgacatgtgaggaagtaatcaaattggtcatgctacattgttccccacaatactccaaaactattcaaatgaaatattaatttttttaacttttaatgggaacattgaatacctaacatacaatttgtttgtaatcttttatttagtttttcttaaaaatattgtttattattggtgtgtatttgtactcagcttttttattttacttggactaaaaagaacagcaaaatttgtttaaaattttttttaattttataaaagggattttttttgttttggtttagctttttggtggtgttaggtgtgtgagtaatagagtcaagtttattaacaatatacgtagaataaaattctcattataaaggcaaatgagaatatatatattttagttcataaacaatattattctaaaatcacaataagagccgccaaattatacaaataattaaaaaatatactgaagttgtttttagaaaaacaaagaacttttaaaactacagagcaacaaggaaagcaaaattgcacgtaacatatagaacattttgaacaataaaagaataatgttttcaataaaattattacataaagctgttaaaactatataactaagttttatacatgtggctttgaaagtaaaataaatttgggcctggcgcaccggctcaagccagtaatcccagcactttgggaggctgaggcgggtggatcgcctaagctcaggagtttgacaccagcctgggcaacacggtgaaactctatctctactaaaaatacaaaaaatcatccgggcgttgcggtgtgtgcctgtagtcccagctactcaggaggctgaggcaggagaatcacttgaacccgggaggcagatgttgcagtgagccaagatcgcaccacttcactcactgcagcctgggcgacagtgagactccagctaaaaaaaaaaaaaaaaaaaaaagtgaaataaatttaaaataagaaacaataaaatatgttcgtgtttatcaaatctaaacattaaactttagttattttactattttaaaataccaatgcagtgctttcctggttttgttttcattacactggcaaggaaaaaaatcaagaaaatactgtccatcaaactgcatattatgctaatgtttattttcttgaaataaaaacaactgtgcagacttcatattaatataatttcagtaaatgtttgtagattatttgatatataatgtaatttaaattctgagaatattgtgaaagacctggaaaaaattatgggaactgaaagtagcatggtcactgtgtatgttaaatacataataaaatttgtgaaatcctttttcagtagatgactttcactctttttaaaaagtaaagctctccattaaaaaggcactttacttgttttccttataatacatgccagcttcaaatttaaaaattaaaaaaggtaaaaggaggtttcagcttcacgtgttcggatagattaactctttgtgctcaaaaaaaagattgttgaagctcccttaaggataactaatgaggagcacccaggcatctgaaagaacgagaagtctgtttttcgttcttgcctaattgccgttaagcaaagatactcttccctaaaagggaaaaatggctccttacgtgttattcctctttgttagtaatgatcactgtgttttgacctcttttcaggatgttttttaaaccatgttttctggttcttctgtagtcttaagtatgtttgatattgttaggtgatctgcataatgtttaatcatttttttctttatataaaccagttggtataattatacctcttttcctatttaagtttgtatgtgtatatgtgattctatagagtagaaaaatgccatcagtttgaaatgatggcacaatcttagtcacttggtttaaataaatagaaaattctaaagccttaaaattaagataatgctctttggcaaactcaaaataaaagcaaaaaaaaaaaaaggaaattaatataaaagaaagcaggacaccagaccttctaaatacaatacttgttgatcttgtctataccatttaatgtagaaaaactaattttctataattgtgtctattaaaggtgacattaatgctgatagaaaaatattcccacatatatctgacttggaaaacttataaaaattgtgctgtctttaaaataaaatttgtatgctttttttgttgtttactttaccttttcttggcaattgaatacaatcttccctctcttaaaagtggatttgctatgaaaattttaagggctgtaaaggaaggcattttcctgattttatatatttaattcttgtgctatagtaattaaaatttcataactagtttttaatttaatagtatctgttgatactttagacaattaaaacattttttaccagtttttatttagtgcttcaaatggattataaacttagtaatttggggactaattgtataaattgttaaaaataaatggattttgcagaaggataggattagtgaaaaggagcagtaaataataaaatgtaatagaaatagaaatgtaatttgtttttaaaataagctatataggaaaactgattgattatatattcttatatggttttaaatcaataaaactcagtatttcacatttaatgcaatagatgctaagaaaaaaattaaccttcagctagaaatctaaataaaaatagaaaataccctttgctgcagtagttcagttgtttaaaaatattaaatctgaggcctggggtggtggctcaatgcctgtaatcctagcactttgggaggccgaggtgggaggtcaggagttcgagaccagcctgacaatatgatgaaaccccctctctattaaaaatacaaaaattagccaggcatgatggcgggcgcctgtaatcccagctgctcaggaggctgagacaagagaatcgcttgaacccgggaggcagagtttgcagtgagccaagatcataccattgcactccaacctaggcaacaagagtgaaagtttgtctcaaaaaaaaaaaaaaaaattaaatctgatataactgatttagtgaaaaagtaagtctaatcccaaaaagaaaaattaataattatctctttggaaataaattataaaattgctaaattttgttgtagagtttagctaatgattaactttgagagcctatgtatttggacttgaaagtgtttatattgactgatcatatttttttttaatatagtttattggtttggtttctttgactttctcatcatcttcaacaagtagagttaggttttttgtttctttgctttaatttcagtattaactactgtggtaatttggtaggtctattctacacaatattatttgtcaaaatgtttttgtaagtggggatacacagattctgtgccaattagagaactatatttttcaactagtttgcttttctggctttaaactttgtttctcctctctatgatagatctgtccagcttcttttttgtttttttgtttttttttttttttgagacggagtctcgctcttgttgcccaggctggagtgcagtggtgcgatttcagctcactgcaaactctgcctcccgggtttgcaccattctcctgcctcagcctcccgagtagctgggactacaggcgcctgccagcacgcccggctaattttttgtatttttagtagatacaaggtttcaccgtgttagtcagaatggtctcgatctcctgaccttgtgatccgcctgcctcagcctcccaaagtgctgggattacaggcctgagccaccgcgcccggccggatctgtccaccttctatattctctttattgtcttttagaaagttgaactaaaggccgggtgtagtggctcatgcctgtaatcttggcactttgggaggccgaggcgagctgatcacctgaggtcaggagttcaagaccagcttgaccaacatggtgaaacctcgtctctactaaaaatacaaaattagctgggcgtggtggcaggtgcctatgatcccagctactgggaaggctgaggcgagagaatcacttgaacccaggaggcggaggttccagtgagccaagatcgcgccattgcactccagcctgggcaacaagagtgaaactccgtctcaaaaaaaaaaaaaaaaaaagaaagttggactaaagagagtggaagaggttctatgatatgaagacttattaataaagcatttacacacattcaaaaaataaagcatttacacattagctcattttttgtcttatgaactattttcattggaatttggatttgaatatatgccatttcaaaaccagaaaataattaaagtcaaatatttgtagcatcaacatgccgaaagaactagccagccgaatgcatgtttcagcatgggaggaggtaacagagtgaagtaaaaagcactgatttcacagtctgaatattgaatcatgtcctatctttgtccctaactgacattatgatcttgatcacttaccctttctgggctgcagttttgtggtctatagattggttataataatatccactatacctacataccagaatcgaaggctcaaataaaatcatggtgagaatgttttacaaaactagcacaagctgtgcaaatgtaggatgttcttttgcttctgggataatgaatgcttacttattgccacataactgttttttccatcttctggctagtgatcggcagagatgtattcatgaagtctggcaaattatagaagaaaggaaaaggtagatgttgtaggccagtgtttccaaaataataaattggttcatggttagtttacagtattttgttaatccctagaatatccagagagaatactaaatttaaatttacagtgttttggtttattcttaaaatgtggtaagagcttaactttaaggatgtaatagtctatcattattttacttgtgtttcagtgaacaacctactgtaatttttttcatcattcatcttattaatcagtgtcatcagattgggagatctttaataaactctagaaagaaccatctttccttcttttcctacttctcattaatgtttctaaatttgcctttttacaggactttgcctcccgggccaaactggcagttcaaaaactagtacagaaagttggattttttggaattttggcctgtgcttcagtaagtgaattgtattaaaacagaacttttactaagtggtagtgttatattttgatccatatatactcctgaattaacaaaagtgctatcacttttattgggtatgtaattttgtgaatcattcacctttttttttttttaagacggagtctccctcttgtcacccaggctggagtgcagtggcatgatctcggctcactgcaacctccatctcctgggctcaagcaattctcctgtctcagcctccctagtagctgggactacaggcatgcacccccacgcctggctaatttttatatttttagtagaggcaggatctcatgttgcccaggctagtctcaaactcctgggcccaagtgatccacctgcctcggcctcccaaagtgctgggattacaggcatgagccactacacctggcccattcaacttttttttttttttttttttttttttttgagacaagagtttcacttttgtggcccaggctggagtgcaatggcacaatctcggctcactgcaacctccacctcccgggttcaaacgattctcctgcctcagcctcccaaagtagctgggatttcaggcgactgccaccacacccagctaattttttttttttttttttttttttttttttttttttttttgagacggagtctcgctctgtcgcccaggcggtagtgcagtggcgggatctcggctcactgcaagctccgcctcccgggttcacgccattctcctgcctcagcctcccaagtagctgggactacaggcgcccgccactacgcccggctaattttttgtatttttagtagagacggggtttcaccgttttagccgggatggtctcgatctcctgacctcgtgatccgcccgcctcggcctcccaaagtactgggattacaggtgtgagctactgcacccagcccaattcaacttattaaatgagctgttttctgttgaataggttcacatcttgtttattggcttttaagtatttcatcatgtagtgatgacttcagacctaaatggcttaaatcagtaagaataaaagagacaaaatccattcttccaatgaagaatatactacatttaaccaaattaaactacatttaaccaaataaggatgacttcattctttcctcaaatttatagataagaagtctttttccaaagtttcaagtattagttacaaggaagaatttatataaaacctgtttaaagcgatgttagctcagggctactctgatttacgtatcttaaatcctttttttgtgtttgtttttctttttttgagacagagtctccctctgtcacccaggctggagtgcagtggcgagatcttggctcacggcaacctccacctcccaggttcaagcgattctcctgcctcaggctacccagtagctgggattacaatcatgcaccactacacccagctaatttttgtatttttagtagagacaaggtttcaccatgttggccaggctggtctcgaactcctgacctcaagtgatctacccacctcggcctcccaaagtgctgggattataggcataagacactgcgcccagcctacatatcttaaatactttaaattcattttcatttcaacatgagttggaaccttatgataaaggaaaaaaaagttataactcatagaattatgagagtcacatgagcaaatataacaaatagcaggtgtgatgctgtgtaaatgatattattatatggttgtaagagatgaaataatcctaaagcatttgaatttggatgagaaaaacaaaaatgagtcattgaatccaagtgttactaacaaaggaatacttgaattctaatttagtcatgtcttttttaaagatcatatgtgacaagtattttttaaataactaggcttttctttcaaagttcaaaaatgaaattatataaattaattggcttattaatggttcagccaacagccacaaggtcagagtactttcataggagaagaagggatgaagtgctcaaaaacagcttgtggcttctttgcatttttacatgaaatgtcttttagcattcttaaaatgtgggaatgtttgggaaaggtatttgttgtgaattacttctttgtctgggactgagtattcaaaacatctgaatctgtgtgatctcatatttccacacttgatcttctttataaattgtgtcacatagccctcagacttggtctctcgtaaaataaaatacaaattattaatattttatgttgagaataacagcacatccacccataaatgtatttgagaatttattaaaatatttgctaatgatatgagtgctttccagataatattcacatttcaagctaaagattttagaaccctaactgctgaaacaatcttaaggctctttcttcactcatacctcaccttagaaaacagccaccaaatatccaggaatcaactgaacgggattaaattcctgcaggtccacttactttatccagttctcatgtgatgggcacacacacaaacacacacacagtgccttagccatgagtaatataagcaaaaggacaccttggtttgctgtgagcagattgaacacctaaggtgaatatgagacccagcttctagacacattaggatgtttgcctaacctccttttgaacaatccagtagtgatcaaggaacccatatattgctttgcagtgtaagcaggctgaaagcagaataccacatatcaatgggtgataaaattaaattgttctttggattataatatggaagtccttctttttctctctatagattccaaatcctttatttgatctggctggaataacgtgtggacactttctggtacctttttggaccttctttggtgcaaccctaattggaaaagcaataataaaaatgcatatccaggtaattataccccctgattcactgcctaatgatgatgaacccattacaagacaatgaaacatgctcattcctaagtgaattatttagttattctttctgcttttttggttggtagcttacttaggtaataccacatagaatgtcatttggaattagtgatctccttgttttctttcttttcttctttcttcctccctccttccctttcttccttctttccttcctttctctctttctttctttattttttgtcctgtttaactatttatccaggactttcaccaaacaaaaatagtgtttgtgtgcagaaagatgcacatcatttttatatacacagcccaaaaaatgtagttttttgtttgttttgttttgttttaccaaccacaagctgagagaatattgccattcactaattcttactttctttcacatactctatatatatagagtgtgtaaagcagttcctcccatgttaccaatatcctttaccgaaaaacagccagatgttagtgtgggaggagaatggggaagaagagggtctctgaagaggcgaggagatgtgggttgtggtcagagaagtgagaatctgctagtcctcaaagccactcttaacaaaatctttaggatggagggtgtgtgcatgtgtatgtgtgtgtgcacacatatatgaatagagaggagagaaaaggttaacaatttaaacgaagggaaaatggatatgtgcttctagaactgtgatatgaattacttccttctaagggcagatctcaatagaataaaataaaaattaacctggaaagaatttgttttatatcagtatggtttgtaacaaagaacgttattaaccaaaagaaaggaaagaacaaccaagcgtggtggctcacgcctgtaatcccagcactttgggaggctgaagtgggcagatcatgaggtcaggagatcgagaccatcctggccaacatggtgaaaccctgtctctactgaaaacgcaaaaattagctgggcgtggtggcgcacgcttgtaatcccagctacttgggaggctgacgcaggagagtctcttgaacctgggaggtggaggttgcagtgagccaagatcacgccactgcactccagcctggcaacagagcaagactctgtctcaaaaaaagaaaggaaagaacagtgaagttctctgcccttgtatgattccatgataattacaagtgtgtctatccccaaagtttctatgttaatacctctctacttccagttcttagaagggaagaatgaaacaggaaaacttcggctgcttctacttatccagtttataatcttagattttggcatttgggtcaagtttattgcgtctgtcctctattttcctgccataatcactcagaatttcatgatgtttttcctacttcaaagaatatatttcctcccatttaaattaagtattttgttcaatcaacgaacacaggttttttaatattacagtgctagttactatggttaagatttaatactggccagatgcggtggctcacacctgtaatcccagcactttgggaggccgaggcgggtggatcacctgaggtcggaagttccagaccagcctgaccaacatggagaaaccctgtctctactaaaaatacaaaattagccgagcgtggtggcgcatgcctgtaatcccagctactcaggagcctgaggcaggagaatcacttgaacctgagaggtggaggttgcggtgagccgagatcgtgccattgcactccagcctgggcaacaagagtttgtctcaaaaaaaaaaaaaaagatttaataccatacaggattttttcaaataataaaatatggtgaataataaattattttcaatgtatctgaaaataggtttttctttaatctttagagttgtttctagaagagagctgtcatttagcttcttgcagtccttaatacctaaggaaaaataacagattattttatttcataacaagaacttctctagtaatccataagttttatgtgtcctgctttatacctcttgaatgcagtgcctttctataaattatagtaaaacgtattatgccataagtaccctatctgtagtggtaagatatgcaacttatcagacctttcatttcagaaagatttaaaactagtatatatttaaacatactcagattttttcaatttatgatgattgattgattgattgatttttgagatggagtctctctctgtcacccaggctagagtgtggtggcgtgatttcagctcactgcaacctccgcctcccaggttcaaacgattcttttgtttcagcctccagagtaagtgggactacaggcgcatgccaccacacccagctaattctgtatttttagtagagatagggttcaccatattggccaggctggtctcgaactcctgacctcatgatctgcccgccttggcctcccaaagtgctgggattacaggcatgatccactgcgcctggccgatgagtgatttttttatggaacttcacactttaaagcacttatctatatgatttaattcttataatcctgggatagaggaattactatacccattttgtaattctcagaggtagggaggttaataagtaatagttgcttaagagagtaagtaacagctggaatttgaacccaagtcttttgacttcaagttcagtgttctttccattcttttgcattgccttcttaactttaatgtattgatatgattaaggaaactgaattgtttaatgcctgctattgatcaggacctgtgcaaggtaatttgcagtagttatctcatggcagacaatcttgagaggttgttattaaccacatttcatagatgagggaactgtgttagagaaggtaaaatacttgcctaaggccctagaatccaaccaagctctgtaaagataaagctctttccctgtatctatgtggaagcaaaaaagaaaaagaaagctaaaatccatttatgtttctgaaaggaaagaatctgagttccttcactaaactaagaccgtgggatatgtttgctgtgttccatcgtatcatagtgacatgctttgtaaaggcatgtcacttgatgtacatccagatgtagcttagggtaacaaacatttctcattctgtgggtaaacaatattagtaatataaacattttaaccattctgaaataatagtgggaaagccacacacacaccgatttttttctaccctaatagtaaacctgtctccttgtctgcttttctttcttccctttttcctcagcttaaaattagacaaccttctttaataaatattgctatttttattgatgtcttcctcttaaccttcccctaaaagattcaaatcaatctacctataatgttagatcagatttccccttccactgcacagagtcaagtactctgtctgtagaagtatccttagataggaaaaggcatgagaagagtatctttttagaaaaaattttttaagaagtagtatccttagagacattacctttgtcccaaataattaagaaaagcaacatactcattcatgttatttcatgtaccatttaacttacttattgtacccttaaaatacatcactgttctttatctctctaccttcacactcaccagcacacacacagtattataaactcccaggagggcagagatttttgtctgttggttcactgatgtattataatgcctagaatagcatccaggagatagtaggcactcaatatttaataactgaatctgtcttaagattcttctttctggccgggtgcggtggctcacgcctgtaatcccagcactttgggaggccgaggcaggtggatcacaaggtcaggagatcgagaccatcctggctaacacggtgaaaccccgtctctactaaaaaaaatacaaaaaaattagctgggcatggtggcgggcgcctgtagtcccagctactcaggaggctgaggcaggagaatgacgtgaaccaggaggcggaggttgcagtgagcccagattgagccactgcattccagcctgggcaacagagcgagactccgtctcaaaaaaaaaaaaaaaaaaaaagattcttctttccaatgaaggacttcttttacagatggttccatctttgttcattctagcacaattagtttctccctcccatgtcttttttcctcctcctctaccctttcctttgtttcttctatgcatgtggttaagagggctcttccgtggtctgtgccttttatttattttgtagaattcccactcagacctcctgcctgaaagactaagacatatgttcttaaatgtgtgacacattttttgtctaacccagaacagtgacttttcaagctgctacatacaaaaagaaaatcttgttttgctgttttgcattgaaattgtgcaattatttaggcattggcttattttgattgttaagaaatgatagtagggaaagttcatggtgatgaaatcactggaaggcaagaactactagctctgttgattaataaaagatttatagctctaaataactggtttttggtatagaccccctgcttttcttcacaaattatctgtaataatagccttgctagcttcataatattcacataccaattgtatacctttgccttattagtcttcttgccagaaataatgtacgttagtctaacctgtccaggttcctgagattcatagtgagtggataaaaagaagactactgttggctgggcacagtggctgacgcctgtaatcccgcactttgggaggctgaggtgggcagatcacgaggtcaggagatcgagaccatcctggctaacacagtgaaaccccatctctactaaaaatacaaaaaattagccgggcatggtggcgggcgcctgtagtcccagcactttgggaggctgaggcaggtggatcaccaggtcaggagttcgagaccatcctggcctcctggccagcatggtgaaaccccatctatacaaaaaacacaaaaatttgctaggcgtggtgtcgtgcgcctgtaatcccagctacttgagaggctgaggtaggagaatggcttgaccctgggaggcggaggttgtagtgagccaagatggcgccactgcactccagcctgggcaacagaaggagactccgtctcaaaaaaaaaaaaagaaaaaagaaagaaagaaaaaaaaaaagggccgggcgcaatggctcatgcctgtaatcccagcactttgggaggctgaggcagatggatcacttgagatcaggagttcaagaccagcctgaccaacatggagaaacaccatctctactaaaaatacaaaaaaaaattagctgggcatggtagcgcatccctgtaatcccaggtactttgggaggctgaggcaggagaatcgcttgaacccgggaggcggaggttgcggtgagttgagatcacgccatggcactccagcctgggcaactgggcaataagagtgaaactctgtctcaaaaaaaaaaaaaaaaaaaaaaggaatacaaagttgataacatttgaattaaatgttatcttttattttattttattttatttttgatatggagtctcctcactctgtcatcaggctggagtgcagtggtgcaatcttggctcactgccacctccgcctcctgggttcaagcaattctcctgcctcagcctcccaagtagctgggactacaggcacatgtcaccacccccagctaatttttgtatttttagtagagacggggtttcaccatgttggacaggatggaaatgttatattttatttttaaagaaatttaaaaattgcaattaggggcacaatcttacctctttagactattaccagaattgtgaatttatgttggttttttgatgactaaataatttattttaactggtgttttctttacagaaaatttttgttataataacattcagcaagcacatagtggagcaaatggtggctttcattgggtaagtaattcttcaaggactaatattaatataattactctttaaatgggagtaaatgtgtacaagactgaattgaaatagaatttttgacatagttctttattttttgaggagcaaaaataacttgctgttattagtaaatgaagaatactttcttgttctatagtagggaaagataaagcttacattatccctgtttaattgtaaaccaaacatctatcaagtcatataattctgggtttaaaagaagctttggggtttgaatctgtagccccaccaaagaaataagaaattgtctttatataaaagatatgtgtatatcattgcagtttaatggtgctttagtacaatgctgtgatttttggccaaactagatgccagatacacagctgcatttaatgtaaatgtaaatcttacataaaattttagtattttatataaaacctagccggccgtggtggcgggcacctatagtcccagctgctcaggaggctgaggcaggagaatcgcttgaacctgggaggcagaggttgcagtgagccaagatcatgccattgcactccagcctgggtgacagagcaagactctatctcaaaaaaaagaaaatttagtatttaattaagtaagtcatgttagatggcataatattaacaaaatttgtcaggtctctattacttcactagagaaaaattaggttattttaaaaggctaaactggccaggcacggtggctgatgcctgtaatcccagcactttgggaggccagggcaggcggatcgcctgaggttgggagttcaagaccagcctcaccaacatggagaaatcccatctctactaaaaatacaaaattagccgggcgtggtggcacatgcctgtaatcccagctacgagggaggcggaggttgcggtgagctgagagcgcgtcattgcactccagcctgggcaagaagagcgaaactccatcccaaaaaaaaaaattaattaaaataaattgcaataaaaccaaaagttgttaggtttttaaatcattattataggggagaggttttcttttcattcagtagtacagctgccccacgggggaaatgtgtcaagtttaagtgccctttgtttagttttaatgtaaatctttatcttaaaagccacttacagagcaaacatttatggaaatttttgctatttaaaaaaagaatgccacttgatgctgagtttgtgactattgatttttttggtcatatatatgttcattcttttctatgtattgtaataaaatagtttttaatatttgctagttcagctttaataaggaaaaaatatattcttgagattgtactcagtggagccagtcattagtttcattaattcctgagcttatcagtgtggattataacttgtacactaaaatttacatttaaaattaaaattaaatttactctagttttttgctgcctgaatccttacaaataaagtattttatatgtgaccatatatcacataaagacaaaaaatattcttgtcccttattttttatttatttatttattcatttttgtagagacggggtctcgctttgctgcccaggctggtgtcaaactcctggtttcaagtagtcctcccacctcagccttccaaagtgttggaattactggcatgagccaccatgcctggcttcccttatgtttttggttttttttgttgttgtttttgagacagagtctcgctccaggctggagtgcagtggtgcaatctcagctcactacaacctccgcctcccaggttaaagcaattcttctgcatcagcctcctgagtagctgggattacaggtgtacgccaccacacccagctaatttttgtatttttagtagagttagggtttcaccacattggtcaggctggtctcaaactcctgacctggtgatccgcccatctcgggcttccaaagtgctgggattacaggcatgagcctccgctcccaaccccttattttttaaatgtaaggaaaacatttcatttattcttagagactactactctaccttgagactgcagagcgcagtgcatataacaccatgcattatttgttcttttcttatactgaacatttatagaaagaagtttttcagctactcctgcatcctcaccatgagtaccttctgtttccccagcctttggagtttctaggaagttacattacttagctacttgtttcatctaccgatatatccagtttcactctcttccaatctgttcaccatattgcagtcagtaacctttttgaaattttaatctgagcatatcatcaccactgtcttcactccctttctcctcctcttcttgaaacccttcacttacttgtttttcccttcattctttagataaagccaaaactccttaccagggtttataagccctctctgtgttatctgtcccctctagtttcctctgctcaaactactttgtccatatttgagtctcccaccactggtctttgcttgtgcttttctctttgcctagttcaagatttctcagccttggcactattgactttttaaagaccagataattacttgttatggggaactgtcctgtgcattataagagatgtagcatcatcttcctcctctactcactgcatgctactagtacctcccaatcatgacaatcacaaatgtctcagacattgccaaatgtcacatggggaacagaccaccaccctcattgagaatcactggcctaaacagtgtcctttagattttagccattgcattctcagaaagcattccctgacttgatctaataccatctttaccaggggcctttcttcacagcaacgtatactacatgcacttatagttatattgttacacttatgtttgtaggagtgtgtgatttactgtctttttactgttaacctgtaagcttctcaaaggcaaagattgtgtctatttttgtttactgttatgtccactggtcctggcgtcttgactgacatatagcagacacttggtaaatctgctgaataagtgaacacatgaccagtacaaattagaaaatcattggtatagcccagattcttctatttccgcaggctttagagtttttatgaaattatattatttatctatggtaaatagaaatgcctttaagcttaggccaatgtggttaagtcagaatatcttatgtctttctttcttttttttgttttttttttttttgtgacggagtctcactgtgtcgcccaggctggagtgcagtggcgcgatcttggctcactggaagctccgcctcctgggtccatgccattctcctgcctcagccccccgagtagctgggactacaggcgcccgcctccatgcctggctaattttttgtattgttaatagagacagggtttcacggtgttagccaggatggtctcgatctcctgacctcatgatccgcctgcctaagcctcccaaagtgctgggattacaggtgtgagccactgcacctgacctatcttacgtctttcaaagtcagtaatttattttaaaccccactggcatggcccctcaaaaaattccagtgatcctttactcttaaagataagatggttttgaatatagttatgctaaaatattcaagacctactggattcagatttgtattgaattaaatgagttgtgtcgtatttgaaaaattatttttaggagacagatgttggaatgtcctgatgtccttatcattttcctagcactgtctacagggattacctcagctacttttctttttttttttttttttttttttgaggcggagtttcactctcgttgcccaggctggagtgcaatggtgcgatctcagatctcgactcaccgaaacctccgcctcctgggttcaagcaattctcctgactcagcctcccgagcagctgggattataggcatgtgccatcatgcccggctaattttttatttttagtagggacagggtttctccatgttggtcaggtcacctgaactcctgacctcaggtgatccacctgcctgggactcccaaagtgctgggattacaggcgtgagccactgcacctggcctttttttttttgagatggagttttgctttgtcgcccaggctggggtacagtggcacaatcttggctcactgcaacctccgcctcctggattcaagtgattttcctgcctcagcctcccaagtaactgggattacaggcgtgcaccaccatgcctggctaatttttatatttttagtagagatgggcttccaccatttggccaggctgatctcaagctcctgacctcaggtggtccgcccacctcagccttccaaagtgctgcgattacaagagtgagccactgtgcccggccattcttttctagataatatattaaacagtataaataattagactcagcagatgctagtaaagctttattatcagatcccaaagggtatccttttagtctttgtcattaataacattatcttttaatcagattctccaattgagcatgacatgattggtttttttatgttttgaagtaggaaatacttttttttttttttttttctgagacagagtcttgctgtgtcgcccaggctggagtgcagtggtgtgatctcagcttactccaatctccgcctcccgggttcaagcaattctcctgcttcagccttctgagtagctgggattacaggtgtgcaccaccacacctggctaatttttgtatttttagtagagatggggtttcaccatgtcacgctggtcttgaactcctgacctcaagtgatccacctgcctcggcccaccaaagtgctgggattacaggtgtgagccaccatgcccagccagaaatgcttttaaatacaagtgttcaattgaaaattaataagtagcctcaccaaacctaaaatggagattaagttcaataaagagaacaaatttttagtagacccaaatatatgatttcatatcataattaatagagtagtactttatttcagaaaagaggaggtgaacagctggatttcctcactagatacactgtctctaacctgctgtagaaacattctcctttagatcatttgaagctaggaattcaggactagcctggaaacatagtaagactctgtctgtctctacaaaaaaacgcactaacaaattagttgggcatggtggtacccgcctgtagtccctgctacccaagaggctgagatggaaaaattgtttgaggcaggaggttgaggctgcagtgaaccatgatcatactactgcactccatcctaggcgacagagtgagaccctgattcttgaaaaaaagaaaggaagaaagaaaataaacattctcctttaattgttagttctctccttcacactgttaaaaccctgaatgggccaggcatggtggctgacgcctgcaatcccagcactttgggaggccaaggcgggtagatcatttgaggtcaggagtttgagaccaggctggccaacatggtaagacccccatctctactaaaaatacaaaaattagctgggcatggtgccgcatgcctgtaatctcagctatttgggaggctgaggtaggagaatttctcgaacctgggaggcggaggttgcagtgagccgagatcacaccactgcactccagcctggatgacagtgagatatgtctcaaaaaaaaaaaaaaaaatcgggccgggggcagtggctcatacctgtaatcccagcactttgggaggctgaggtgggcggatcacaaggtcaggagatcaagaccatcctggctaacatggtgaaacccagtctctactaaaaatacaaaaaaaaattagccgggtgtggtggacggcacctgtatctcagctacttgggaggctaaggcaggagaatgacgtgaacccgggaggcggatcatgcagtgagctgagatcacgccactgcactccaacctgggtgacagagcgagactctgcctcaaaaaaaaaaaatcgctgaatggtatagcaaatcatcaaactaaattagtaaacttcagaatgcagtcttttgaaggatatttaaaaccttgcagtcacaaataaaggagagataacttgtcatggtagagaacaaaatcaaaagacaagcaagaaaaaagccagcagcagttgaaatttaaaataaaattatgagataataaggcaaggaagaatgaaaaatgaatcccgggccgggcgcagaggctcacgcctgtaatcccggcactttgggcagatcacctgaggtcaggaattcgagaccatgctggccaacatggtgaaaccttgtctccactaaacatacaaaaattagccgggcatggtggcaggcacctgtcgtcccagctactcaggaggctgaggcaggagaatcacttgaacccaggaggcagagcttgcagtgagctgagatcacaccactgcactccagcctgggcgacacagcgagactctgtctccaaaaaaaaaaaaaagggtatcaaaaatcttttggctggggccgggcatgatggctcacatctataaccccagcactttgggaggccaaggcaggtgtatcacctgaggtcaggagttcaagaccagcctgggcgacctgatgaaacctcatctctactaaaaatacaaaaaattagccgggcgtgggggtgggcgtctataatcccagctactcgggaggctgagacaggagaatcacttgaacccgggaggtggagaatgcagtgagccaagatcgtgccagtgcactccagcctcagtgacagagggagactccttctaaaaaaaaaaaaaaaaaaggaccaggcgcagtggcccacgcctgtaatcccagcactttgggaggccgaggtgggcggatcacctgaggtcaggagttcaagaccagcctggccaacatggtgaaaccccatctctactaaaaatacaaaaattagccaagcgtggtgatgggtgcctgtagtcccagctactcaagaggctgaggtgggagaatctcttgaacccaggaggtggaaattgtagtgagccgagattgcgccactgcactccagcctgggtgacagagcaagactccgtctcaaaaaaaaaaaaaaaaaaaaaattggctaggcatggtggctcacgcctgtaatcccagcactttgggaggccgaggcagatggattggttgaattctcaggaatttgagtccagcctggtctcgaacatggcgagacccaaagtcaggtgatagaaccaaagaactagggaacttctagctcaaaaggcattatgttagttgtgatttttttttttttttttttttttttttgagacagagttttgttctattgcccaggctggagcgctgtggtgcaatctcgacccactgcaacctctgcctcctgtgttcaagcgattctcccgagtagctgggattacaggcacctgccaccatgcctggctaatttttgtgtctttagtagagacaggatttcacgatgttggctaggctggtctcaaactcctgacctcatgatccacccgccttggcatcccaaagtgctgggattacaggcataagccaccgtgcccagccctttttgtttttttaattacgatttaatactaatttttatttaattttagactttctccagtgggagagacctgtgcatatttcttaaagagcataaccaaatctaacttttaaagttatgattaaaatgacatgttcccatattctcaccaaataggggatgtgaattcccagaaaataacattaagcatatgactcgcagcaaaccatatgcagaacattggctcattgtcatgttgccagggtcttattggaagacaaagtccccagttttaccacacaagaaaagtttccataactcaatcattgaacttgagggctgggggatggtgttggctggaacagggactttttaccagatacagaatgttccatgctcttctttgctgtctcctatttctgagctaacttgatgcttgacctcagagtcaggcttgcctgtggcaagagagatcattttaaccagtgagtaataaagtgcttgaatccgaatgttgtttcttatccctcactctatggaaagtggtcagaatgagctacgtgggcctggactttttcttctacagaaagaaaatctgtcctttcattttagaggataaaatggtccatgtatttgattctctttgactttgatcattgaaaataatcagaaaaagttatggaagtgtggaaccccagcatttgtattatctgatgaaaggatagaatttaaggcttaacacagggtttaaaccccagctgccgagactcagttatacagtctaacataacctctttctgcagcttgggaaaacccctttctcttcttgtccgtggtagtttatatatccttctcttttgacagttaacctttctatatgtttgttatggatattgggagaccacataaaggttaaaacaggagttctggagttagactgttagatgagaaatgggtacattgtatttggaagttaccgttgaccatttaatggagcattttagtagcatgatgaaaattaaaacccaaatatattggattacatggaattgtgggctagaggaaaggtcaagcgaaagtcatgtctgacacattttaattgttttgtaaatatttgttgaccagatgaattaattcattcattaaataggagggaccagtgtgtattttaggctgagggaaaaactctagtaaaatgctagagatagaaaatataaatgaagaaagggaaggatgtgggaaggaaattaacattcagtaagcacccactgtgccagatgctttacataaatattcatttcatatccataacaaaacctgttaggtactattacagagaagttaaattcatataaatgataagagatgattgagataggatcaattctggagtggattgattatcctcatgaaccagttctttcttgaaaactggagtgaagactccaagatgttttgaggcagagaagggggacactcctgagggagcactctggaagccagtgaagtcatttgctggaagttggaaatttagactagagcaccagtttcaaacagctgctgtgtgaatttggtagggatgcagcatgaattctgtctattctcctgtgcacacgtgcatccacctgtgtgcagctgtagctagttactactgtggttactttcaatgaaaaacctactggtttctgtagtgtacatttaagtgcattttttcccctctcccagcatccttctagatagagttccttgaggacagagatcataacttttttttaagtgagattgaatttcaatcaatactgtcactttttttttcttttttgagacagggtctcgctgtgttgcccaggctgatcttgaactcctgtgctcaagtgatcctcctgcctcagcctccccaaatgctgggattacaggcatgagccactgtgtcctgccaatactatcacttttttggtttttttgtttgtctgtttgttttttgagaccaagtcttgctctgtcgcccagcctggagtgcagtggcgtgatctcagctcactgcaacctctgcctcctgggttcaagcaattcttctgcctcagcctcccaagcagctaagactacaggcatgcaccaccacccccagctaatttttgtatttttactagagtcggggtttcaccatattggccaggctggtctcaaactcctgacctcaggaggcctcggcctcccaaagtgctgggattacaggcatgagccgctgtgctggcctgatttttaagttttagaactcagtgagtcttcaaaccagtgcagatctgtcactataaaaagctgccaccaggcccactcacacctgtaatcttagaactttgggaggctgaggcgggattgcttgagcccagaagtttgagaccagcctggacaacatggtgagaccccatctcttgaaaaaaatttaaaaattagctactgtggccccagctactcggaaggttgaggcaggaagattgcttgagcccgggaggtcaaggctgcagtgagtcgtgtttgtgccattgcactcttgagtgggcaacagagcaagatcctgttcccaaaaaaaagctgccactggggccaggtgcagtgccactcgcctgtagttccagctacttgggaggctgaggcaagagacacaacctctttaaaaaaaaaaaaaaaagctgccaccagtctgtcattttctataaatgcaatcagttgatttttaacagagttttgttttggcaaccaatcagttttacctagtccttatagaccactcctttagctctggccacattcatcagcacaaatgcctgcttttctcctgctgctcaagtctgccttctgaaatgaggttttgttctctagagcttctctttaatgttagcttatttcaaagagtagctgctaatgataaggaagtctaacctccaatctgattcttacagaaaataatgctaaatctccaaaagctagggcaattgcagattattttgtgataaaatatgctgtaaggcagtagaaacaatgtacctgataaaatacacctggagaaagcatggtcttccttctacacagccagaaagaaacccatggtgtcatgtgttcataataccactctgcgtacaatggactaacttaagtacaaaagaagttttaatcatttgaaagggcacagatgtgaatgaaattcaagatgttttaatcccagatcctggggtcaaatcacaacgaattttagaaggtgccagggactgtcagtccaaacttgtatatatgagaaagccctagattttctagtatagtgtgtgattttcatcctgaatttattttatgttggggtgccattccaagatcctggatgtaaagaaacatgattagggggctaccacatttcagatccaaagcaagtagaatacatcagttaccagttttttcttatagtatcagcttcaaagattcatatactgagccaggcacagaggcttatgcctgtaatcccagcattttgggaggtcaaggcaggcggatcacttaaggtcaggagtttgagaccagcctgaccaacatggtgaaaccctgtctctactaaaaatacaaaaactagcagggtgtagtggtgcctacctgtaatcccagctactcagggggttgaggcaggagaatcgcttgaagccgggaggtgaaggttgcagtgagccgagattgcgccactgcactccatcgtgggtgatagagccagactccgtctccaaaaacaaaacaaaacaaaacaaaaagattcatgtgttctattcagttaaatggtaaagataataacactttcattccagtcacacaggataactagatccttttttactaggttaaatatgtgtttattttcagttagcacctgttcatttacttattctggattaataaagggctgaaaggctgtagatattaatgagtcagcatgatggcctttggcttcttcagaaagattgcatgataaactcccccacccttttccgagcagtctaccttactaggaaaggcagtttcatgtggagggcaatctgtcatttttgaataagggcaagagtctgaggtccattctgagtcactatgaatagagctctagtattggttggtccccagggaaactggtggttaaatactgtgagaatctttatcagacaggaaatgacaactcattaaaatactagccgttaagcctgtttagatcactgcctagggggtaggaaggaaaatttaactctataatgtttgactaaaatgtgcacatttctgaagatggagaattatttacaagactgttaccgagaaagggaattgctaggctgtcttgttgctgatcttctcccacaccctcttttcctcttttgtacatataacagatcagcttgtaatgggagtaggatagggaagggctttaatttcattcctgaaagtgtatcctactattgccttaaatgtaaaattcagtctcttcagcagaagaggcggttgttggcttcagttagaacaggatcattttctatataggagtctactcctgtgctcctgggccaaatctcaattgatagaactctctggggtcagaggataaatttgatgtattgatttacatacagtggtcctcattcaatcaagaaaattctaaagatcctgatattcatttagaacataattaaattttataactctgggcacaggttttcagtctcctgaagttgggctatccagatttggtgggggcggggacaggggctagctctgttgcccaggctggagcaacatctgcctcccaggcccaagtgatcctcccacctcctgtcgcatgccagcatgctcagccaatttttaaattttttgtagagaggaggtctcactatattgcccaggctggtcttgaactcataggctcaagtgatcctcccaccttggcctcccaaagtgctgggattacagtgagccaccaagctgagcactcttttctttttataagtaccctgacctgaatcttctcctgaaaaattttttttttcatttataagctttcagggatctgacttatgacaccctgagattctttagactttgtgattaatcatcagagggaatactaacccagcacaaacaatgaaataaaggtaaaaaactgttgtgcccagacttttttctaagacaaaaggcttattactctttgtaaagaggctatcgcctccttactagaatttatgtcagaatgtttttcaggagggtaaatataacctatatgctcacattaatgctgagatcctcaaaaaagtatttgagaaaggagcagagcctatattaaataaaaaatttactttattaatgctggtaaaatattcttaggcttagagacttcaactgcttagactttaagtatacactctgtaaatagggctaaacaaggtgaatcaatcttttttgttggtgttttaagaaacaggttctccctctgtagcccaggctggagtgtagtggtgtgattttagatcactacagcctcaacctcctaggagggctcaagcagtcctccccactcagcctcttgagtaactaggactacaggtgtgcaccacacctggttaattttctgtgtgggtgtagagacaggagtcttactgtgttgcccaagctgatcttgaactcttagactcaagcagtcctcccacctcagcctcccaaagtgctcggattactggcatgagccaccctatcctgcctggccagatttcagatcttacttatttattatctatctatctaatctattgatttattgagagagagacagggtcttgctctttcaccaagggtggagtgcagtggttcaatcctagcttactttaaccttgaactcctaggctcacaggatcctcccatctcagcctcttgaatagctaggactacaggcacttgccatcacacccagctacttttttaaacttttgtagagacagggttctcactatgttgcccaggctgatctcaaactcttggcctcaagtcctcctgcctcagtctcccaaagtgctgggattacaagcatgacccatcacacccagcctaaaatacagatttcttgtcacataagtgatttccagaagcagagtaacatatatattaaaaaccatagaaaaataatagattttgtttgcaatttggcaagggctcttggcagaattttgcccaaatgttattttgaatggattttttttttttttttttttacaatatttaagcttgccaagaagtttgtcttaggtctgtttaacagattctaggtatgtaagcatgggaaaatattgttcccatgaaaccaattttgagctctgagtaggtttcaagtctgtgtttttttctttaaataaaaaaaaaaattttatttgcattcctgagttttttttttaacagaagttaacaataacaaaagtgtaaaaattgccactagcatcatttgttggaaatgtgtttgtttgtttcggagacaggatctcactattttacccaggctggaatgcagtggctattcacaggcgtgattatagctcactaagcctccatcccaactcctgggctcaagagagcctcctgctcagcctccagattagctgggactacaggcatgcgccaccatgcctggtggaaaaattttttttaatcttacatttgctgttatgtttgtgccaggaataaaaatatgaagatactactacccactaagatttttctacccactgtgttcaaggttcacagcaaggaaaagcaaatgagatcaacttttttttttttttttttttttttgtcacctagactggagtgcaatctcagctcattgcagcctccactacccaggttcaagcaattctcatgcctcagcctcccgagtagctgggactacaggcacgtgccatcacacctggctaatttttttatatttttagtagagacaggatttcgccatgttgcccaggctggtctcgaactcctgagccatggtgcccaacctacttctttttttgtttttctaaggctttctcacctagagcaagtacctacttacatagctagtttaggtatattttagtcctgcagttgactgaaaaaatagttctatgtccatttgttctccttctactttatgttcttctatgtcacaaaattgtagttatttgttttgttttgttttgttttgttttgttttgttttgagacagagtctcgctctgtcgcccaggctggagtgcagtggcacaatctcggctcactgcacccttcgcctcccgggttcaagcgattctccttcctcagcctcccgagtagctgggattatgggcgcccaccaccgtgcctggcaatatttttttttttttttttttttgtatttttagtagagacagggtttcaccatgttggctaggctggtctcgaactcctgacctcaggtgatctgcccacctcggcctcccaaagtgctgtgattacaggcatgaaccaccatgcccggccgaaatggtaattctttgaatttaatcagagcttaagggcaaattggaggacttccccaacttaactatgggatgagattagcatctttagcaaggtgcacagggttgcaagaatgtaatggcttagggagaatggcatttagggtatttcctaaaccaactatagaaagcctttgaactgtgttgcaaattattactcccaccgtgtgtgcactttaaattaatcttaagtgtcagaatggactcttgcttctggtctgctgcttgagaataacttgacacatgagatttagagctggcattattgtttgccttaaatgcatgttaagagtgagagctgtaatttctatttttatctagtccgttactaaaatagctttagtgataattaagcaaactatagtataagagtactttgttgaagctgaggcatcagtagcctaagtcattgtagaggtagagaaatgaaaaacagaagtaactaaaattttgatgacagtttgggaaaccaaggtgggaggatcttttgaggccaggaatttgagacccacctgggcaacatagtgagactccatctctacaaaatataaaaagaaacataataataataataaataaaacttttaacctcttgtctgttttcaactgttttcctagtctttcatggaaacctccatagagacacataacaaattggtatattaatctcagcattatcctcaagataagttatacatcatgtgaatacacatcatatgatgtactctatcagctaaaatgtatctatcagctaaagtgtatctctttttaaaattattatgggtacataaagtgtatctcttaatggacttacaatggtaaattatttaccttttcaaattattttgaagggaatctagaattattatttccagtcccttcctcatttccctaaacaacaaaaacatactctttgtaacatttgggtcttggttcttaattttctcttaaataatggcttgactatggctatccctggtagatttaaatgacaatttacagtactgttttttatttttgtttttgttttgttttgagacggagtttccctctttttccccaggctggaggacaatggcgcactgcaacctccacctcccaggttcaagcgattctcctgcctcagccccccgagtagctgggattacaggcgcccgccaccaaacctggcttattttttgtatttttagtagagacggggtttcaccatgttggccaggctggtctcgaactcctgacctcaagtgatccgcctgccttagcctcccaaaatgctgggattacaggcatgaaccaccgcacccagccttgtttttgtttttgtttttgtttgagatggagtctcactctgttgcccagggtagagtgcaatggcatgatctcagctcactgcaacctccgcctcccaggttcaagcggatcctcctgcctcagcccccactagtagctgagattacaggcatgtgccaccgtgcctggctacttttgttttttgggggggttttttgtttttttggtttttttattttgagacggagtctagcttagctgcccaggctggagtggagtggtgcgatctaggctcactgcaaccaccatctcccgggttcaagcgattgtcccatctcagcctcccaagtagctgagattacagacacctgccaccatgcccagctaattttttttttttttttgagacggagtcttgctgagctgcccaggctggagtggagtggtgcgatctgggctcactgcaaccaccatctcctgggttcaagtgattctcccatctcagcctcttgagtagctgggattgcaggcactctccatcatgcccggctaatttttgtattttagtagagatggagtttcaccatgttggccaggctggtcttgaactcctgacctcaggtgatccacctgcctcggcctcccaaagtgctaggattacaggtgtgaaccaccgaggctggtctaatttttgtctttttggtagagacagggtttcgccatgttggccaggctggtcttgaactcctgacctcaggtgatccacctgcctcggcctcccaaagtgctaggattacaggcgtgaaccaccatggctggcctaatttttgtctttttggtagagacagggtttcaccatgttggccaggctgttttgtttttttgcttttttgtttgtttttttttttgagacggagtctcactctgtcgcccaggctggagtgcaatggcgtggtctcagctcactgcaacctccacttcctgggttcaagcgattcttcggcctcagcctcccgagtagctgggattacaggcgtgtgccaccacacccagctaatttttgtatttttagtagagacagggtttcactgtgttggccaggctggtctcgaactcctgacctcgtgatctgcccacctcagcctcccctggtgctgggatcacaggtgtgagccactgcacctggccagagtactgttaaagtgaaaacattgatttatgagaaggaaagttcttataaatatgcagttttttgttttttttttttttgagacagagtttcactctcgttgcccaggctggagtgcaatggcatgatctcggctcactgcaacctctgcctcccaggttcaagcgattctcctgcctcagcctcactagtagtggggattctgtgcatgtgccaccacgcctggctaattttgtatttttagtagagacgggttttctccatattggtcaggctggtctcgaactcccgacctcaggtgatccgcccgcctcggcctcccaaagtgctgggattacaggcatgagccactgctcccggccacataaatttgcagttttcaaagtcaacctttttgtgcatatatttatatacacaaaaatacatatatttaattatatatatttaatatattaaatatttaaaatattttatatatttgttatattcatgtcatttatttctagtctaaatggatgagctatttgcattcccacctgtaatatataaggaaagattactagtctgcctccctaatataagtctgcttaaaagtcagggccaggagcggtggctcagtgagaggctagtctgaaggtaatgagttttctcgattgttcacagcatcttttatgtctgtcacaggtcttctagtctgatcagtgcagtattcacatttattatatatgtctgttcaggccttttgtacctccttcagtattcattaaagaatcttttttttatttttttatttttatttttatttatttatttatttttttgaggcagggtctctgtcaccgaggctggagtacagtgcagccctgagcttcctgggctctcactgtagcctcctgagtagcagggactacaggcacatgccaccattctcagctcatttttgtattttttgtagagacagggtttcaccatgtttcccaggatggtattgaactcctgggctcaagccatcctcccatcttggcctcccaaagtgctgggattacaagcgtgagccaccacacatggcctagaggacctttttaacaacttcacccctcactgatctctcttttctccctccaattccttcggtatatatcttctgtaccaaaaactttaatattgaattgtaaattattttgttcacagatcagttcgtgtgtgtgtgtgcgcacacatgtgtgcgcatctgcctatgttttgaatccaaatccccataaatgattttaagttccttgtgggcagtttggttttttttttttttggcttttttcccagcaaaaggaatcaattaagtatttggtgactgatagataaaaaggattaaagaaaagaatcagccagaagttagggatatgttagcatctgataaaatataatagcaaaaactcttctattcctgctttttgttataaaaagcagcaaggaattgttctagaaaagaagtgaaggccagtcgcggtggctcacacctgtaatcccagcactttgggaggccgaggaagggggatcacgaggtcaggagttcaagaccagcctggcaaagatggtgaaaccccatctctactaaaaatacaaaaaaaaatagccaggcatggtgacaagcgcctgtaatcccagctacttgggaggctgaggcaggagaatcacttgaaccctggaggtagaggttgcagtgagccgagatcaggccattgcactccagcctgggggacagagtgagactctgtctcaaaaaaaaaaaagtgaagtgaagtgaatttgagtcagtgtacttaataggacaagcattaggcagtgttgcaagtacatatcggaatctctttggctggctctaagaaagagtttgaacttatttacctccttagccctatgtaacaggtaagaaactaaaaggtacagaaaatagagatgtttgatttttctaagttgccccaagctaccgtttttaaaaacgcctgcaagcatgtctaaaacaggagcctgttagctacagttgccaaaccggtttaacagcactgcctccatgtattctgggtaagaaggagctccgagtacataaatttatcaaagatcactatcccaatcatctcagaacaagctgttactaatgtactggagtttctgtgcaaactgtctaccataaaccatgaaaggattcaaagttcatagttccttctttgttcctttgttaatcactgacttctgactagtgggaggtgcctcccaagtttgctaatgcattctttttggataaggatgacgcacagattgtcctaataaggacttagattgagaaagaccgccccctctgagaagaggggacaagtcagagagagggcgggcagtttcttttttaactagggatgacacaagcataagtcatttccttattaattggttcaaaccagttcttacaggaactagtggtgataaatgtgggacttctgagaagtcattcattttattctttgtgccataccagagtacagtatcagctgagctgaccttactctgaggactaactcttttgctggaagcggtttctgatttacagctcttggtttctcccagacatgttggtgggagagattttggtttttaaggggttgttagatggagtaaattttctttttttttttttttttttttaactaaaaaggggtcacagaatttcagcagttctctgatttttatattttattcctcttcctatccaatccctgccttttgagtccaggtggtaagtacattttctttaacgtttttcctgcttttcttcccaaatgtgtctttttctttgggctactgtaccctgcttccagtgctgtccccggcataggtccatctctgcagaagccatttcaggagtacctggaggctcaacggcagaagcttcaccacaaaagcgaaatgggcacaccacaggtaagactttaatccggtttcttctcccctctgggaagtttcgggctgaaattacattcacagctctcactcacatttttaggcaaataagtgaagttggtttgccagtgttccttgacagaagttgagcgtctgtgtatgctctactgggaaatttgtctttgtcttagactagaaagtgtaacttctgtacatcttctcctaaaaacaagggtagagccaatggaaagtaatggttctgttacatagaatgagttgttgccttgatcttaaatgatgtattggtagatatacttcccaagtggattaaaaagttaaaacttacagcataacaaagtattagacttactgaggtgacttgaatatctccttttgattttcactctatttttcttttcacccatgggaaaatgataattttttaataaaccaaggctcttaccatagctgaactttaaaacttagactgtcttttctgtaaacgattctgaggcaaagggaaatgactagaagaggatgagtaaacaataacctgaaatgggaaactcgagggaagcacaggttttttttgttttgttttgtttggttcgttttttgttctttggggtttttttgagacagaatttcgctctcgttgcccaagttggagtgcaatggcgcgatcttggctcactgcaacctccgcctcccgggttcaagcgattctcctgcctcagcctcccaagtagctgtgattccaggcacgtgccaccacaccagctaattttttgtattttaatagaaacagggtttcaccgtgttagccaggctggtctcaaactgacctcagatgatccgcccgccttggcctcccaaagtgctgggattacagatgtgagccaccgcgcccggccagagcactgttttttttaatggccttgcactcttcttatggacctttgctgccctcagttgaccaaacatgacatcagaaacagatacatttgtgtgttttaaaaacagctcctaatactggaacaaaaatatttaactgtcttgacaatactcatgagtatctgcatggcgacttcagagttgagtttaatcaaagagtttattcttaggtcctagtagaagagctaacctcacactcatcccattctaaactatgtgattcaacactgattttacatccaacaaagtgaaatcttgatagttgggtgtaaaaaggagagtaatggagatttcagagtagttggggttgcttacttttcatttttaattctttaggttttgtaagttacacacttcaagcattatagatgatcctctttttactactgaactaatgaagcctttttcattgcattgttctgcatttatttctacagggagaaaactggttgtcctggatgtttgaaaagttggtcgttgtcatggtgtgttacttcatcctatctatcattaactccatggcacaaagttatgccaaacgaatccagcagcggttgaactcagaggagaaaactaaataagtagagaaagttttaaactgcagaaattggagtggatgggttctgccttaaattgggaggactccaagccgggaaggaaaattcccttttccaacctgtatcaatttttacaacttttttcctgaaagcagtttagtccatactttgcactgacatactttttccttctgtgctaaggtaaggtatccaccctcgatgcaatccaccttgtgttttcttagggtggaatgtgatgttcagcagcaaacttgcaacagactggccttctgtttgttactttcaaaaggcccacatgatacaattagagaattcccaccgcacaaaaaaagttcctaagtatgttaaatatgtcaagctttttaggcttgtcacaaatgattgctttgttttcctaagtcatcaaaatgtatataaattatctagattggataacagtcttgcatgtttatcatgttacaatttaatattccatcctgcccaacccttcctctcccatcctcaaaaaagggccattttatgatgcattgcacaccctctggggaaattgatctttaaattttgagacagtataaggaaaatctggttggtgtcttacaagtgagctgacaccattttttattctgtgtatttagaatgaagtcttgaaaaaaactttataaagacatctttaatcattccaaaattgtgtccgttttcttgagcgttttgattttttacttttagcttataccagctgaatggcagccttgcctaatccacctacaacaagaatttcttaagctttcttttatttgcatgagagagccactaccaaggcatgttttgttatgctgaaactgggctgctgcatactgctaaatggcacctctgggattggcctacctggggatttcttggtttgtgaaaacaggagaggagaaatatctcatacaagtgaaaggatactggagagagaaattacccatttctaaaaaaaaaccacactctgtcgtatctgtgttaatgttttctagcatgtactctggtttcaacagacacaaatttatatgttaacccagttttcttgccgttctgtaagtgttttattcttagtgtgatttttttccattgggatgtttttgattgaacttgttcattttgttttgcttgggaggaaaataaacaattttacttttttcctttaggagcattatgagcattatgtcagaatagaatagaattggggttcgatcttaacaggccagaaatgcctgggtttttttggtttgtttttgtttttgtttttttatcaaatcctgcctgactgtctgcttgttttgcctaccatcgtgacatctccatggctgtaccaccttgtcgggtagcttatcagactgatgttgactgttgaatctcatggcaacaccagtcgatgggctgtctgacattttggtatctttcatctgaccatccatatccaatgttctcatttaaacattacccagcatcattgtttataatcagaaactctggtccttctgtctggtggcacttagagtcttttgtgccataatgcagcagtatggagggaggattttatggagaaatggggatagtcttcatgaccacaaataaataaaggaaaactaagctgcattgtgggttttgaaaaggttattatacttcttaacaattctttttttcagggacttttctagctgtatgactgttacttgaccttctttgaaaagcattcccaaaatgctctattttagatagattaacattaaccaacataattttttttagatcgagtcagcataaatttctaagtcagcctctagtcgtggttcatctctttcacctgcattttatttggtgtttgtctgaagaaaggaaagaggaaagcaaatacgaattgtactatttgtaccaaatctttgggattcattggcaaataatttcagtgtggtgtattattaaatagaaaaaaaaaattttgtttcctaggttgaaggtctaattgatacgtttgacttatgatgaccatttatgcactttcaaatgaatttgctttcaaaataaatgaagagcagctgtccttctttcctcttttaagtgttcagctgtggcatgctcagaggttcctgctggattccagctggagcggtgtgatacccttctttttcagctgttcgtgccttcctttcttgtatccaccaaagtggagacaaatacatgatctcaaagatacacagtacctacttaattccagctgatgggagaccaaagaatttgcaagtggatggtttggtatcactgtaaataaaaagagggcctgggaattcttgcgattccatctctactttgtataagtctcattttgtgccttacacatctgcagtatttatcatgttccaacttggtgactgtcaggcagtgcaatacatcagcagtttatcaccgaagagctgaggaatacctcccttaaaacagacaatgtcggccgggcgcggtggctcacacctgtaatcccagcactttgggaggccaaggcgggcagatcacctgaggtcaggagtttgagaccagcctggccaacatggcgaaaccccatctctactaaaaatataaaaaattagccgggcgtggtggtgcacgcctgtaatcccagctattcaggaggctgaggcaggagaatcccttgaacgcaggaagcagagtttgcagtgagccgagatggcgccactgcactccagcctgggtgacagagcaagacaaaaaaaataacagatgatgtcatatgaaaatgtgcaatgtccagttttcccatagttttctgtattctctgtgtgcataatctggagtatgagtctgggaagaaaaaggtttttagtttcatttggatagtggccacctctccattccctacgaatgctagaatgaagttactttttttttttttttttttttttttgagacagagtcttgctccgtcgcccaggctagagtgcaatggtacaatctcggctcactgccacttccgcctcccaggttcaagcgattgtcctgcctcagcctctggagtagttgggattccaggcgcccaccaccacaccaggctagtttttgtatttttagtagagacggggtttggccatgttggtcaggctggtctcgaactcctgacctgaggtgatccacctgcctcggtctcccaaagttctgggttcacagacgtgagccaccatgcccacgtagaatgaagtttcttaaatacactagttaattattgaaacatatgcagtattgagtgctcctacacaaacacgctcagcctctgcccccagtgtgctctgtgctatccacagccttagtagaacatgaggctttttgtcatttcaccagtcattcaataatgactcatttgagtatggatcatgcactagctaaataaccagttgcgctcatgtaccctgaagcaaattgtttagcctgacccatgtgtaagaagatcacagagattcccaacctttcagtgtcaaaaagcctttccatatatattactttaaaacccattttcccccatgtgtaatagtctatgttaatgacggttcgggtttcttctacattgtttgtgacctgagaaagtttaaaagagcctcagtttctttcatctataaaaataaaagagatagaaggacagtttacctaaggaataaatctggtaacatgtaaagtactgaaataggctgggtgcagtggctcatgcttataatcctaatactttgggaggccaaggcaggaggatcccttttaggccaagagttcaataaatagggccgggcatggtggctcacgcctgtaatcccagcactttgggaggccaaggtgggcagatcacctgagttcgagaccagcctaaccaacatggcgaaatcacatctctactaaaaatacaaaaatgtagcaggcacggtggcacatgcctgtaatcccagctactcgggaggctgaggcaggaatcgcttgaacccaggaggcagaggttgcagtgagccgagatcttgccattgcactccagcctgggcaacaagagtgaaactccgtctcaaaacaaacaaacaaaaaagagttcagtaaaagtacagcaataaaagttatccacctccaccaccccagcttttttttttttttttttttttttttgagagtgaggttttactgtgtcacccaggctggagtgtggtggcacagtcatggctctttacagccttgacctcccaggctcaagaaattctcctacctcagcctccctggcaaggaccagcatgaaccaccatacctgggtaattttttaattttttgtaaagacagggtctcaatattttgcccaggccagtcttgaattcccaggctcgagcgatcctgccgtggcctcccaaagtgctgggatgacaggtgtgagccaccatgctgggcattcccaatgaaagactgaggccaggcacagtggctcacgcctgtcatcccagccttttgggaggccaagacaggatcacttgaggtcaggagttcaagaccagcctggccagcatggtgaaaccctatctctactaaaaatacaaaaattagccaggcgtggtggcgtatgcctgtaatctcagctactcgggaaacaggcaggagagtcacttgaacccggaaggcagacgttgcagtgacctgagatcgtgccactgcactccagcctgggcaacagagcaagacaccatctcgcaaaaaaaaaaaaaaaaaaaaaaaaaaagtgagcatctgatacacatgcaagaatttcacaacattgcattcactcctccagaaacaaagatatattttaaaatgctttcttagcatatgtgctctggttttctagcagatactctgtcaaacttttgataagtgaaaaatttaccgaagaatttaaaaccaaaaacagttttttaactttcccacctgaaaatattgaccattttctaatttattttcattataaagaatattggttatcatggttgctcatgcctgtaattctagcactttggtaggccaaggcaggcaaatcactcctgagcccaggagttcgagaccagcctggacaacataatgagacctccctacaaaatatttaaaagttagccaagtgtgacagtatgtgcctatagtcccaggctgaggtggatcacctcattagtgagccgtgattgtgtcactgcactccagcctgagtgacacagaccctgcctcaaaaaatatatatataaatactaaaacatctggaaggaaagaggagaaaagggagtatcagcttttaatacttgttacaaggtcagtctagaaaatacagtgagatttgctgggtaaataggttttgaaccatgaaaaaattgatggcatgcaagatcttcctcaatagacctaagagtctcatttctattaaaaaatacaaacaactgcttcattttattcataaataattttttgaggtgctacaaaaaattaaaactaagcaggagtttaaagtttttgaaaagccaagtaacattttatctctaacatttattgaatcctctccagtatttacacaacgtaaatgagatactacacacaaaacccttgtgtctgaaggtaaatttatttattctcaaagacaacaagaagagaaagcacatcatgtattttaaactttagaagcaactgagtcattagtgtctggtggacaggagctagggatcctatcccttcccaacaaggccaagagttcacctgaggtaatgcatttgccttgggggcgaggccttgaattgcagcaaataacctgtgtgtatttgcatatttaaccagtactcttaagaaggattatacaaaaacctgttccagacagctgcttactcattgcctttaaaattgcgtggtgctgggattggcaggtgccaactgtttgctcattctctttgacccactagccttgcagtttgctgtgtgggtgttgatactcctaaattaaagcagggaaggggtggttttagatggcttttaacacctgctctccacccaagcaccctggattcatttgatatctggattctaattctgtagtcaggagactggcccaaactgtggcccagagagaagtgagtcagttgcaagtggctagctgactctatgggaacagaaataaaatgcagcttagagagtttgtcagccaaatccacaaatgtgtggctttttgaaacattggacatctgttcctcttaatttaaaataaactttttttttttttttttttaagcacaaagttgcttggctccttgtttctttgtgtcagcagcagttgctgctctaatttaggaaccctaggatctgatttaggacatttggaatctttaaggcacattcgatctagaaagtggaactgaattgctttgggaaggcaagaggatgattttacagtatagggtttgtgtggaaatccccttcagcagtaatcaacccaggtgtccaacctgtttgttaaccatttccaaatgactcagaggacctagagggagggcttgaacacactccagcactgtttctacaatttagcctttatttgcattggaaaccacattcctgaattcttgagggggcaggctctggcttattctgggcaactgacttcaagtgggacccctgagctacctatgtaagcaaagagtcagccatctctggagagttaccagggaggaggatctttctgtgaacttgctttgatgacctccacccaaagccctttgaggaacagttttgtttattcaaggagcccttggcaggtcactcctcccctaccacaaatctaatccaaatgcgacattttcctttgaggccatctatcccttttgggggacaaaacacatcagcttttcccttcagaccacttttgactgaagcagtgatcaacattgcttaattgtgttccagtctgtttccagcggggaaaaaatgctttaggggagtgaggcagttagggatttgaaaacagggatggtgccgcctgaaggtggggaatgacttagatcactgtcttcctttggctcctcaccatgttgtgtggaggaaacgaaaagcagctcaagttcactcctcttggcagtagtgcagaagcctggcttgccacggccctggagaaccatgtttttcccaacttttttttttttcttttgagacggagtttcactcttgttgccgaggctggagtgcagtggcgcaatctcggctcactgcagcctccgccttccaggttcaaagcgattctcctgcctcagcctctcaagtagctgggattacaggtgcatgccaccacactcggctaattttttgtatttttttcagtagatacggggtttcatcatgttggccaggctggtctcgaactcctaacctcaggtgatccacccgcctcggcctcccaaagtgctgggattacaagcatgaaccaccatgcccagccttttttttttttttttttttttttaatacagaacacaaatttgagtgtcattcttgtgcaggggccatgctaatcttctgtatattgttccaattttggtgtatgtgctgccaaagcaagcacccagcttcttttcattagttaagaagatgaaggccaagactaaggcagggaggcctttctctgcctttcactctttagtgcacctcacagtcagttgcacttgagtaaggactgctaaacctctctgagagctgccagatgttcctgcctagcctcaggttgttggttcttcagacacctcttcattctgcccattgcaccagccctttcccatctccatgttccctccatggtaatttctttgtacacaacaaccacacggagcaccagcaatcaagattagctcccgggaactctggcgtgccctgtaccaggaagcacagtggattactacaacttttgataatgattgtttgctttgtaccaggcattattttcagggctgtttcacatgtgttgtacttaacaaccccatgaggaaattaaggcagggtggttcagtaatttgtcaagggaaacaaggaagtagagcaggcagcagaggcgttctggctctgaactactctgttctgtagaaatcagtgcaaaagtccaagcttcagcatacttgtttcatcttgtgatcacaggtagttttttttgttttttttttgttgttgttgttgttgtttatttgtttgttttgagatggagtctcgctgtcgcccaggctggagtgcagtggggcgatctccgctcactgcaggctccgcctcccgggttcaagccattctcctgcctcagcctcccgagtagctgggactacaggcgcccgccacctcgcccagctaattttttgtatttttagtagagacggggtttcaccgtgttagccaggatggtctcaatcgcctgacctcgtgatccgcccgcctcggcctcccaaagtgctgagattacaggtgtgagccaccgcgcccggccctgatcacaggtagttgatggagaaaggaagataacagaaaatcaaggccacaacctcaaattttgctatttaaatagataagcagactttactcttccctgtatcacagggttggaaaagcaagctccattcttagccatccatgtgggcagattcccagagtggtgtttgctataattatgatttaaaagcaaggttttttgtttgtttgttttaaggagatggggtctcccatgttacccaggccgaactccaactcctgggctcaagtcatcctcccgcctcagcctcccgagtagctgggactacaggcactcaccaccacacttgggtaaaagtaatttctatttctacagcctttttttatttttcaaagtattttaatgtcttgagtttgggttttgttttgagacagggtttcactctgttgcccaagctgaagtacagtggcgcaatcacagccacagctgactgcaacctccacctcccaggctcaagcaatcctcccgccacagccgccccactccccaccagtagctgggactacagagctgcaccaccacacccagctaatttctgtagtttttttttttagtagagacagggtttcaccacgttgaccacgctggttttaaactcctgagctcaatcaatccacctgcctcggcctcccaaagtgctggaattacaggtgtgagccactgcactcggctaggaaacccttttctgatctttccttgtcagcaatgatctcttcacacttcctttcttacggccctcacctcactctgtattatagttatctgcatatatgaataaaatccctaagaagactgcagggtcctggagggaggagatctgtatcgacaactttgtctcttcttcacagcaccttacaccagtggggatttaaaaagtgaatacagggctgggcaccgtggcttatgcctataatcctagcactttaagaggatgaggtgggaggatcacctgtcgccaggagttcaagaccagcctggcccaacatggcaaaaccctgtctctactaaaaatacaaaagttcgctgggcgtagtgatgcatgtctgtaatcccagctacttgggaggctgaggcatgaggattgcttgaacccgggaggcagaggttgcagtgagccaaggttgcaccactgcactccagcctggttgaccaggtgacaaagtgagaccctgtctcaaaaaaacaaaacaaaagtttcctgaggggagtagtatttgaattgacaaggtagagggagtgaaacgaaaggtattctaaccagaaaaaaactcagacaccaggaaagaacaaataaggggctatgtgtagggtggggagaaagacagcatcaggttttccactcgagtcctctgtagctctgccttagctcgctgtttagtttccttaaagtaccgaccaaattcacaactagtttgtctattttcttgctagtgcttgcgacactagaacataagcccggtgaaaggaaaataaatcttgggaccccaaaatcactaagccaaagaaaagtcaagctgggaactgcttagggcaaacctgccccccattctattccttaaaaagatagctactaagatttttttttttaaaaaaactgcatactggggctgggcgcggtggctcatgcctgtaatcccagcactttgggaggccaagcaggcagatcacaaggtcaggagattgggaccatcctggctaatacggtgaaaccctgtctctactaaaaatgcaaaaacttagctgggtgcagtggcggatgcctgtagtcccagctactcaggaggatgaggccggagaatggcatgaacccaggaggcacaggttgcagtgagctgagatagtgccactgcagtccggcctgggcgaaagagcgagactccgtctcaaaaaaaaaaaaaacaactgcataccggccgggcgtggtggctcacgcctgtaatcccaacactggcaggcagagacgggcggatcacctgaggtcaggagtttgagaccagcctggccaacatggtgaaaacccgtctctactaaaaatacaaaaattagccaggggttgtggcgggtgcctgtagtcccagctactcgaggctgaggcaggcgaattgcttgaacctggcaggcagaggttgcagtgagccgagatagagccactgcactatagcctgggtgacagagggagactatctcccccccccaaaaaaaaaagaaagaaaagaaaaagaaaaaaatgagaaagagagagagagagagagaaaaaaaaagcattagaaaaacaatgggtgaccggggtggtagctcatgcctgtaatcctagcattttgggaggcagaggctggtggatcacctgaactcaggagttcaagaccagcctgaccaacatggtgaaaccccgactctactaaaaatacgaaaaattgggccgggtgcagtggctcacgcttgtaatcccagcacattgggagaccaagacgtgcagatcacctgaagtcaggagttcgagaccagcctgaccaacatggagaaaccccatctccactaaaaatacaaaattagccaggcatggtggcacatgcctgtaatcccagctacttgggaggctgaggcaggagaattgcttgaacctgggaggcagaggttgtggtgagccgagatcgtgccattgcaccgtagcctgggcaacaagagcgaaactctgtctcaaaaaaaataaaaataaaaaaatagctgggcaggttgaaactctactgtaggtccagctacttggggggttgagatgggaggatcatttgaaccccgggaggcagaggttgcagtgagccgagattgcgccactgcactccagcctgggcaacagagagagacgccatctaaaaaaaaaaaaaaaagaaagaaaatggcgaggaaggacccaaagaacccctgaaaagacagcaatgcccatccccaagccaggaatataaaggaggcaagtctgaggaagacagactattctgttttgaatatgtggaggggcgataatgaccaataggatggtggggcctgtaatattctctatcttaggcttcctaactcctaaactcctagtgaatatgccgttctttacaccacactgtaacttctgtcagtgaataagctggacttcttcagagaattctccagggtaacaggtccttaagccgtgttatgtggtggtgctgttaaagagatggcactgtgactggaccttaaggccacagtaaacttttaaaattcctctccccagtatcccgctggcttaaccaacggcccctccctttgagaactgagaggatggtagttcctggagagatcatctgtctttataaggagaaaagtttggcaatgtgatttcctgtatgtttctaccggagtccaagattccagcagtgctagcctagacagcagcggctgcatcctagaacccagaggtcaggagtgctcccaagtcagtgtgagggcatcttcccaactgcctttgccaagccaaaaggcagaatcacgactttgttacaccttctggagcatgtggtcgaggcggctttccatgtggctgctttggtgctgagcctgtttacatgtttcagtaaatgagttattgcttattgaagttggctggctaggagctcggaataaacaacatataaccacaatgacaccactctccagaagtaccagagttcagagggaaagatctgcttgtatgttccactcccacgtggatgcgtagttctcaaagcctgggaggactggggtgtcactgttcccggctttctgatggaatcagacataatgagatgtcttcctggtagaaagtgtatatgaaagtactttgcacaatctcagaaggaaaagggagggcactgcttttagaaaaatgtatgagatcaaagaagttttcagatgttctgcattttcttcttcaattataaagaattcatctgagcataaaagactccctggtctctgtaagaagtaaaaacttctttcatacacaaaagttttcctactttatatacttctttttagactgtttcatttattttttgtggtatatttattagtcttccctgaagtaggcagtgttcattagaagaacatgttgagacaattaagaccccaaagttaatctttaatttctcccttcttcctgtgccacctggatgaccttggagtgtccaggagttcctacaccccatctatgtgacaatttacagaataattttttttttaagacagagtctcactctgttgcccaggctggagttcactggcacgatcttggctcactgcaacctctgcctaccccaggctcaagcaattctcatgcctccacctccagagtagctgggattacagatgcattacacttggctaatttttgtatttttagtagagacagcgtttcgctatattggccaggctggtctcaaactcctgacctcaagttatctgccaacctcagactcccgaagtgctgggactacaggcgcatgcgccaccatgcccagctaatttttgtatttttcatagagacgggtttcaccatgttggccaggctggtttcaaactccttgcctcaagtgatctgcccacctcaacctctcaaagtgctgggattacaggcatgagccaccgtgactagcccaaagatgtttcttactactacttattaccatcttctgatttaccagacattcctccactcttcaaattgtctcataatgggggctttaacgggcttcattcactgtgtgactgtagtgttgcagctttacctgtcttccagagttttagacattgatatgaatctgttcagtaaacatggagtctttaccatgagtcaggcgtatgctctgcagcaaacaatatgccaagcggtggcctcctagtggccggaggccaggtctaactcattattaccccgccctagcacagtgtccttccttgcaggtgttcagtcgatgtttgttgaattaagctcacatcctgcctctttcatactcatcgcatgagtcgagcttaagcaaaggcctttttttcatcaaaaaggaaactcccatcttttgccttttgtcatgtttcttaccatcatgttcccatgacctctcacctagtaaggacaaattctgttcaactccagtttctacaattcccagcagtttgctcctggaatgtttagaacagcctgtctcatagaaataacactgcaacccatatacctcattttaaaacaatgtactgccaggcacggtggctcatgcctgtaatcccagcgctttgggaggccgaggcaggtggattacctgaggttgggagtttgagaccagcctgaccaacatggagaaaccccgtctctactaaaaatacaaaattagctgggcgtggtggcgcatgcctgtaatcccagctacttaggaggctgaggcgggagaatcttttgaacctaggaggcagaggttgcagtgagcctagactgcaccattgcactccagtctggacaacaagagcaaaactgtctcaaaaatgacaataacaataaacaatttacttgctatgtttcaaaaagtataaaaaagggctggacacagtggctcacgcctgtcatcccagcagtttaggaggctgaggtgggaagatcacttgagcccaggaatttgagaccagcccggacaatataatgaaacctcgtctctacaaaatatttaaaaattagccaagcatggtggcgcctgctttcccagctactcaggaggctgaggtgggaggattgcttgagctcaggaggtggaggttgcagtgagccaagattgtgccactgcattctagtctgggtgacagactgagactctgtctcaaaaaaaaaaaaaaaaaaggaaagaaaaagtgatgtcaggcacagtggctcatgtctgttatcccagcactttgggaggctgaggccggtggattgcttgagctcaggagtttgaaaccagcctggtaaaaatgaagaaaaccctgtctgtgcaaaaaatacaaacattagcagggcgttgtggcacacagctgtggtcccagctactcaggagatagaggtgggaggatggctggagccagaggaggtcaaggctgcagtgggccatgattgcaccactgcactccagcctgggcgacaaagtgagactctgtctcaaaaataataataatcaaggccaggcacggtggctcacgcctataatcccagtgctttaggaggccccgtctctactaaaccccatctctactaaaaaaaaaaagtacaaaaattagccgggtgttttggcataggcctgtaaccccagctacttgggaggctgaggcaggagaatcgcttgaacctgagaggcagaggttgccatgacccaagattgcaccactgcgtaccagcctaggtgacagagcaagactctgtgtcaaaagaaaaaaatttttttttaattggctgaaagagttacgttatcgtctaaaaactttggaacatctgggttgagataaggggttgtggagaccaaggttttatgcaggtgaagcctccaggtaacaggctttggagggagagaacaatgagtgtaaatgtttgttaccagacgtaaaagagtctgttctggctgggtgcggtggctgacgcctgtaatcccagctctttgggaggctgaggcgggcggatcacgaggtcaggagatcgagaccatcctggctaacatggtgaaaccccatctctactaaaaatacaaaaaaaaaaatttgccgggcgtggtggcgtgcgcctgtagtcccagctattccggaggctgaggcaggagaatggcatgaacccaggaggtggagcttgcagtgagctgagatcgcgccactgcactccagcctgggagacacagcgagactcagtctcaaaaaacaaacaaaaaaaagagtctgttctatcaggaattccaaaagggaacagggtataaatctgtccgaccctaccccctttccatcatggcctgaaacagtttctcaggttagctttggaatgcccttgccgataggagggatccattcagatgttcgaaggcttagaattttatttttggcttatattaggtaaagtttataattcaaaacccatcaagtttcttttttagcagttctttgggggcatgatcaattcccctgacctttcttttcatctcttcctgtttcactggctccctagagtcaaatgattaggactttgtatcttttccccttttccacagctggaatgccatacactgacctgacattgtttcccagaaacttgaaatatttacgttgtttatcttaactccttgtgcaagcattcctgcttgcggaaatggttttccatctattaataagattgacattgcatcatctgagacatttcagggtgtaggagtaggaagttatttaaaaatataaagccagttttttgctttttttttttttttcttgacatggagtcttgctctgtcgcccaggctagaatgtagtggcatgatctcagctcactgcaaccttggcctcccggattcaagcgattctcctgcctcagcctcccaagtagctgggattacagacgtgcatcaccacacccagctaattttttgtatttttaatagagacggggtttcaccatgttggtcaggctggtcttgaactcctaacctcaggtgatccacccgcctcagccttccaaagtgctgggattacagtcgtaagccaccgtgcctggctaaagccagtttttttagctcacattcctcaaacccataggaaacaatatgattgatacagttgaggaaatatctcttaacataaatgactgttggttggccaggtgcagtggctcacacctgtaatccaaggagggagggccattgggaggctgaggtaggaggattacttgagcctcagagtctgagaccagcctgggcaacatagtcagaccttgtctctactaaaaataaaaaaaattagccgagtgtagtggtgtaccactgcagccccagctactcaggaggttgaggcaggaggatcacttgagcttgggaggttgaggctgcagtgagccatgattacaccactgcactccagcttgggcaagagagtgagaccctatcatctcaaaaataaaataaaataaaataaatgattgttggcccaaaatgacaagctagtggttaaagccatatttggtgggtaggtggcagaacaagaaaggggtatctgctaaactttgggctcatgagagaagatagtgggttagggacatatgcagtatgttttaaaagaaaattttggacaggaattcaagtgtgatacacatggtggtcaggagaatcactagtatgtatactgcaaagtagagtttatagagcctacagagccagtgaagagacatttcaacacttaagcctagcccagaccagagctctgagttcattgttctttctttctttcttggaccacattctttcctggaaaaaaggtgaatatgcacacaggcaagataacaagcaataattaggaagctagaattgtagcactaaacatcccaaaaagcttcttcagacaaggtagcattgatccctgtatccttaacatcttcctcagtgcctggcactgaatagatgatactggttgaatggatgaattggctgataatagtgaattgttggcatacttagtgagttctaagtgatgggtaaaatataggagaaagatgttgaaagatgttgtagattgaatagtaagggtggataggggaggggagttttcggggagatcccagggctggaagtggcgaatgcatgggaaaaaacaggttctacagcttaagctcttgaggaaagattggggaggtaagagagaaagagcttgacaataagaaacagtatgcattcacactgtgctcattgtccacaggggtgcattctggctctgcaggataatgtttgacaacgtaatgtgccagttatcccataatctaagaaattacactttcaaagttttctggatctgtatgcccaggagctaagggagccaatgttgtcctcctggctgactggccattatctccacacaaatcaaagcacatttccaatgccactccatctgaagttttgacatcagcatcttggtgttaatttttaacttaaaatcacaactttaagagcaaaaattttgttattccaagtagacaagaaaaaattattttccatgtgaatgttttaacccaagctttaaaatatttaggcattggccaggtatggtggctcacgcctgtaatctcagcactttgggaggccgaggcaggtagatagcctgagcccaggagtttgaaaccagcccaggcaacatgaggaaacttcgtctctaccaaaaatacaaaaattagctgggcatggtggtgcacacctatagtcccagttattagtgagtctaaggtgggaggattgcttgagcctgggaggttgaggctgcagtgagctgagatcatgctactgcactctagcctgggtgacagagcgagacgctgtctcaaaaaaaaaaaaaatacatacacacacacacacacacatatatatgtaataggtaaccatacatatcaaataatgcagttgtggatcataaaaaagggtcaaatagcataagtaaatggacccagagctctgtctagttgggatttgcttctaatgttcacctgctaatgattccacgagttgccaaattagaaatatacttgcccctattggtacctcatgaattttctcaaatatcaaatgatttcaacttacgactttctttcaagttaacttctagtaaggttcctcagaatcagattaacccctggtgagatactcagttacagatcttcatgaatgctggtttagtctgggaaattgtttcagtctgtggatctcttcaatgcttaaacaattactttaacttgtttggtaaaaattatgatctaattatttttcaagtgtacttggcttaacgaaatgcagcagcggggtgtgccttttagcagcagaaccgaccactttttacattccttacaaataagatatggttcagtattttaaatcatagcaacagttgataagaaaaacagcaaaaaggtaatcatttccatatggaaagaaaaagaagaaccagtgaagctgtgaactgtcatttttccatataaaagtcactattggtagatttggcagaaagggcaaatgttcctatttgttaatcattttacatttgttaatatattgcatgtgatgtgttttatggaaatacaacattcccttcaaactcagttgtcaatttccaagcacgttttgtcttgggtgaaacccgtatcttgtgcgtcaatttcatcaagtaactatatttccttggtgataattttctcaacttagtgaaaaatttaggtgaaaattcttaccccttttactgaaaagcatataaccatcatctgtaccagctgaatacctataagtaatttcattctttttttttttttttggagacagtcttactctgtcacccgggctggaatgcagaggcacgataccagttcactgcagcctcgacctcccaggctcaagtgatcctcccacccaaacctccaaagtagctcagaccacaagtgtatgccaccacacccagctaattaaaatttttttttttttttggagagatgggggtcttactgtatttctcaggctggtctcaaactcctggcctcaagtgatcctcccactttgccctcccaaagtgttgggattacaggtgtgagccaccatgcccagcccattataagtaattttaaagcaataattgaataaaatcaatatctgctctggcattccaagatccaaaacaaaatttgagccaattttctcatgcccaaaaagtttaagaaaagcacactaagtacacatttacctatttacttttgtacttaagcataagcatttattaccaaaatcctcatatttatttttaaatagctgcttagagtggaaacttgccctgttacagaatattcaaaatacatgttcacactgtagcatttgacaacatctccctcctgtggttcaaagcattcatttcaaacatgaatatattaagtacagaattacaattccttagcttgaaattatgctgtgaaagtttggttcatgctttgtgagttgtttttggagttgttttggagtaaagatttaggaacatgtagacaaagagaatattctcttttcttggctagttccagagtcccaacatttcagcaaagtgtttccccaaagttctttataaaagcaccatttttttttcttacaaatgaaataccaagtgaatgttttcattgaaaacatgcgattctccattttaaaaagttttcttccttttctgtgggcatagtatgcagaatagactcagcattctacgtggttactttaacagaatggaactttgaaaacatttttttttttttttttttttgagacggagtctcgctctgtcgcccaggctggagtgcagtggcgcgatctcggctcactgcaagctccgcctcctgggttcacgtcattctcctgcctcagcctcccgagtagctgggactacaggcacccgccaccgcgcctggctaattttttgtattttctggtagagacggtgtttcaccgtgttagccaggatggagaactttgaaaactttacagagaaaatagtattgaaaatattttagtccagaaatgccttaaggtatacttttcccattgttcaagatcagagattacagtaactggcaacaacctgctctaatgacgtgaaactgtctaaaaagtcctcttcttcgattccaaattttgtgtactgatgaatgtaggctctggtagaaaaaaaaaaaaaacagaaattacaaaataaaaaatgtctggcaaatgagtaactcttaaacaataaacagaccttttctagctgatgaacatttgaagatcacacaatcgttcagaagtcttacatttgctttgtttactccaaagattagtgaactttcttttttttttttgagacagagtcttgctctgtcacctaggctggagtgcagtggcatgatctcggctcactgcaacctccacctcccaggttcaagcgattcgactacctcagcctcccgagtagctgggattacaggaacgtgccaccacacccagctaatttttgtatttttagtagagacggggtttcaccataatggccaggctgctctggaactcccaaccttaggtgatccacccgcctcggcctcccaaagtgctgggattacaggtgtgagccaccacgcccagcctgaactttcaaaatttatgtcaagctccctgttttttcagtgtccaaaaaactggcaaaggagaggcacccgggaaagagcagcatgttcagatttggctatctactcagtatatatatatatacatatataacaccctatattcagtataaactctgaaaagtgcctgaaaagtttcatataagccttgaaactagaaaacacatcagtccagttctaggaatggagtgaagcctcccaggtgctcccaggacatttaatttgtagttatgccagggtggtcctctcaatccctcccaccccacaaaatttttttttttttttgagacagggttttgctctgtctctgtcacccaggatggagtgcagtggtgtgatctcggctcactgtgacctctgcctcctggggtgaagcaattcttgtgcctcagcctcccaagtagcgggaattacaggtgcgtaccaccacacctggctaatttttgcatttttagtagaggtggggtttcaccatgttggccaggctggtcttgaattcctggcctcaagtgatccacctgccttggccttccaaagtgctggggttacaagcgtgagccaccatgcctggctgctccctgcaaatgttctgaggcacaaaaatcatgtgcaaaaagaatatcaagggcagacatgaattaaattgacataataatggctgctaccatttaacgagagtaggaagggaatgacaccagaagaggacagacttcatggccctgtggagtgggtttttttgtttgtttgtttgtttgtttttgagacagagttttgcactgttgcctgggctggagtgcagtggcatcatcttggctcaccacaacctccacctcccaggttcaagtgagtctcctgcctcagcctcccaagtagctgggattacaggtgcccgccaccacgcccagctgttttttgtgtttttagtagagacggggtttcaccatgttggccaggctggtctcaaactcctgatcttgtgattcgcccaccttggcctcccaaagtgctggaattacaggtgtgagccactgcacccagcctgagtggggttttatggaatggtcacatgcaggatggctgggccctggggtatccgagctaatgaaagttataggtggctgggcacagtggctcacactggtaatcccagcaccttgggaggccaaggtgggcggatcacctgaggtcaggagttcgagaccagcctgaccaacatggagaaaccctgtctctactaaaaatacaaaattagctcggtgtagtggtgcatgcctgtaatcccagctacttgggaggctgaggcaggagaactgcttgaacccaggaggcagaggttgcagtgagcagagatcatgccattgcactccagtctgggcaacaactgcgaaactccatctcaaaaaaaaaaaagaaaaagatagttagaagccttgtccactcatttgaagaattttgctttgacttaagtaactgtggtagagatcaagaaatctgctaaaacatgttagtatgaagtagacatttcttagtatcaaaccaagttgaatttaatcataatcttattgaggaacataaggatcttccactctcccaagaatcttatgttttttaatttaatttaatttttttttgagatggagtctcgctcttgttgcccaggctggagtgcaatggcatagtctcggctctctgcaacctccacctcctgggttcaagtgattctcctgcctcagcctcccaagtagctgggattacaggcacccaccactatgccaagctaatttttgtattttttttttttttttttttttttttttgagacggagtctcgctctgtcgcccaggctggagtgcagtggcgcgatctcggctcactgcaagctccgcctcccgggttcacgccattctcctgcctcagcctcccgagtagctgggactacaggcgcccgctaccacgcccggctaattttttgtatttttagtagagacggggtttcaccgtgttagccaggatggtcttgaaatcctgacctcagctgatctgctcgcctcagcctcccaaagtgctgggattacaggtgtgagccaccatgcccggctgatgttatttttgaaaactatcttattgtccctgcttcataataaaattctactttaataatgtcaaacaattactgagcatttactagccaggcactgtactagctgttttacaagattatcttatctaatcctcgtgagaaatgtcctcagttaggacccacttatacagatgaggcaatgaagcctgaagtcacgtgcccaaggcttcataccttcacacctacaaagtagtaactatgcttcctgcagatcggacctcatgctttaacgctacagtatctgcttataagttagaaaggctgcagtgcatggtggcttacgcctgtaatgccagcactttgggaggctgaggtgggcagatcccgaggtcagaagttcgagaccagcctgagcaacatggtgaaaccctgcctctactaaaaatacaaaaattagctgggtgtggtggtaggcgcctgtaatcccagctacttgggaggctgcagcaggagaatcacttaaacccgggaggcggaggttgcagtgagccagtgagccaagatcgtgccactgcactccagcctgggcaacagagtgagactctgtctcaaaaaaaaaaaaaaaaagaaaggtttgtagacttattttatacttactttgaagcaaacatattccatgccttcccaacaatcatatcaagtggttttactaagaactggctgttgctgaccaacactgcagacttctcatatttgctaaaggcccgctgggttttccacacgttgaaagcattaacaggcttcaaccaggaagtatacagagctggatctttaaatccctctagagtaaaaacaagataagccgtctttttatagcataaattagtaattgtgaaaacaaacaaacagatattttcttgtctatttcatcagagatcttttattttgccttttaaaacttgtgatggctggtgcagagacttccagaaatttaggaggtggaggagggtagattgctcgagcccaggagttcgagaccagcctgggcaacacagtaaaaccccatctctactaaaaataaaaaatattagctgtacatggtggtgtgcattcttcttaacacttttctgaaaggtgtgaattattactaattttttttttttttgagacagcctgttgcccaggctggggtgcagtggcatgatgttggctcactgcaacctctacttcctgggctcaagcaatcctcccaccttagcctcctgagtagctgggattacagatgcccgccaccatgcctgcctaattgttgtattttttgtagagatggggtttcaccatgttggccaggctggtctcgaactcctggcctcaagtgatccacctgcctcagcctcccaaagtgctaggattataggcatgagccactgcactggtccctttcttttctgtacaatgaatatggatcatttattcgaaaataatatactgccagttttgttttgttttgttttgagacaggatcttggtctgtcaccaggctggtgtgcagaggcactatcacagctcactgcagccttcacctcctgcccttaagtgatcctcccacctcagcctcccaagtagctgggactacaggcacacgccaccatgcctaatatttttattttttgtagagatggggtctcactatgttgcccgagctggtctcaaatttctgggcccaagcaatcgtcccacctctgccaaagtgctgggattacaggtgagagccactgtgactggtcctattttaaattattatttgttctttctctaaggggcattacagggactagattgttcggttttcttttttctttttgataatggatctcactcttgtcgcccaggctggagtacagtagcaccaccatcattggtcactgcagcctcaaactcctgggttcaagtgatcctcctgcttcagtctccctagtagctgggactacaggtgtgcaccactatacttggctaaagtttaaaattctttgtggagatggggtctcgttatgttgcccaggctggtttcgaactcctagcctcaagcgatcctcctgacttagcctgccaaagtgctgggattacatatacgtgccactgtgctgggccttggttttctttgcatcacaacaagaagtagcaaacatgatacttgctgaagtcatgataaaatgaacctggaaacttgccatagaaaaacaaagctagtaagaataatgccctttcagctgggcgcagtggctcacacctgtaatcccagcactatgggaggccgaggcaggtggatcacttgaggtctgcagtttgagaccagcctggtctgcagtttgagaccagcctggtcaatatggtcaaatcccatctctactaaaaataaaaaaatcaaccgggcatggtggcgcatgcctataatcccagctacttgggaggctgaggcaggagaatcacttgaacctgggaggcagaggttgcagtgagctgagattacaccactgcactccagcctgggtgacagagtgagactctgtctcacacacacacaagaataataatgctctttcaacttcctgaaaaatttgtaacaaaatgcttttcacagataccactggttgtccagcaattcctgctccttagcaattcccgttcaccccttcttccttagtatcaattcccctaaactttaactgaacttgcagtgaggtgtgtcacagaactcagtaccagtcaatgggacagaaattcaagtgtgatatgtgactttgagaaaaggaggcaagcctagctgggcgcagtggctcacgcctgtaatcccaacactttgggaggctgaggtgggcagatcacctgaggttaggagtttgagaccagcctggccaacatggagaaaccccgtctctactaaaaatacaaaaattagccaagcatgctggcatctgcttgtaatctcagctactcaggaggctgaggcagcagaactgcttgaacctgggaggcggaggttgcactgagccaagatcacaccactgcactccagcttgggcaacagagtgagaccccgtctcaaaaaaaaaaaaaaaaaaaaaaaaggaaaggaggcaggtccttctctgctcatttctataaggaggcagccagatggtaaagtaagggtgacagggcagccagatgttcagaaaacaattctttttttttttttttttaatagagacagggtcttgctctgctgcccaggctggagggcagtgccataatgatggctcactgcagccttgacctcctaggctcaagctatccttctgcctcagcctcccaagtaactgggactacatgcgtgtgctaccacacccggctaaaggaattatacttttatcttgtttaaaccacttctatattggtgtctagtcacatactaactgatgccatggtcaaattttgccactaaaacacacagttattactttcctttctccaagaacacagggactttttaaaaaccatttgtaccatatagcatgtacaggtacaaaatgtaaatcttaattttcacctgaatttcttacccacatctgcactttgcacatctttcccacgaagaatgaccaagttagcaatggaagtgttaaaatgcaggtccttgttgagagacattttactaagaggaggaagtcctgataaaggaggccatacatgcctatcaatacctaccaaaagaaaaaaaaagcaagaggttttattttatttacttagttttttgagatggagtctcactctgttgcccaggctggagtgcagtggcatgatcttggctcactgcaacctccatctcccaggatcaagcgattctcctgcctcagtctcccccagtagctggctagacaggattagaggtgtgtgccatcacgcccagctaatttttttgtatttttagtagagacggggtttcaccatgctggccaggctggtctcgaactcctgacctcgaatgatctgcctgcctcagcctcccaaaatgctgggattacaggcgtgagccactgcacccagcccaaaagcaagagattttataaatggctttgaacaagaggagaaaaatggtcttgtggtatgtgtattttaggttttttttttggacagggtctctcgctatgtcacccaggctggagtgcagtggctattcacaggtgtgatcatacctcactgcagcctcaaactcctgggctcaaatgatcctcccgccttatcctctgatgtagctgggactataggcatcatttttcctgtttaaaagggagggtctaccaattctcctatgcctactccactagactttgttggggcaaaaaattgtactcaaagggctatactcaagaaatcttaggatgggtgtggtggctcatgcctgtaatcccagcagtttggtaggctgcgctgggaggatctcttgagtccaggagttcgagaccagcctggacaaaatagcagactctgcttcttaaaaaaattagtctggcatctgtggcatgcacctacttgagaaactgagtggggagaattgcctaagcccaggaggtcgaggctacagtgagccgtgatactgccactgcactccagcctgggtgacagtgcgagaaataccacttgaggagtataaatccatgctgcttttggaggataagattttggaccgatgtgctaatgggatgtaacttttgggggctttgggaggggaggagtgtactgtgcatgtgggaggacatgacttagggacagcgcagagaacagtagtcagcctccaaaatgaccccaatcatctttgcttcctggtattcaagcccttgggcagtatgctctcacactggagagggctgaccttaaccaaaaggatgttgcagaaataacatcacaaaaggtcacaaaaggtgttaacttcaaggctgggcatggtggcttatgcctgtaatcctagcactttgggaggctgaggcaggcggatcacttgaggtgaggagtttgagaccagcctggccaaaatggtgaaaccccatctccactaaaaatacaaaaaaaaaaaaaaaaaaaaaaaaaattagctgggtgtagtggcaggtgcctataatctcagctacttgggaagctgaggcaggagaatcgtttgaacccaggaggcagaggctgcagtgagccaagatcatgccactgcactccaccctgggcaacagagcaagactccatgtcaaaaaaaaaaaaaaaaaaaaaggcattaacttctgccttgctccctcctggatcacatattctccctaatggtagaacatgcagaaacagatactgatggtgagagaaatagggtaaatctttacgtagaggccaggcgcggtggctcatgcctgtaatcccagcactttgagaggctgaggtggaaggatcacttgaaaccaggagttcaagactagcctgggcaacatagtcagaccccatctctacaaaaataaaagaaataacaaaattaggccaggtgcagtggctcatgcctgtaatcccagcactttgcgaggcagaggggggggatcacgagttcaagagatcgagaccatactggccaacatggtgaaaccccatctctactaaaaatacaaaaattagctgggcgtggtggcacacgcctgtagtcccagctactcaggaggctgaggcaggggaatcgcttgaacccgggaggcggaggttgcagtcagccaatattgcgccactgcactccagcctggcgacggagcgagactccatctcaaaaaataaataaataaataaataaataagaaaattagtcacttatggtggtacacacctgtagtcctagctataggaagctgcgataggaggatcacttgagcccaggagtttgaggctgcattgagctatgattgcgccactgcactccagcctacgtgacagagtgaaaccccatctcaaaaacaaaacaaaacaaaatcttcccacagagcaaagaatatatgaagagttataaaactagatccttcaacctggtttgtgccatatatatatatttattcatatactattcatacatgtgtatgaaaacatttatatgttcaaactatacaactgtgaaaaaatgctgacacccggccgggcatggtggcttctgcctataatcccagaactttgggaggccaaggcgggcaaatcacaaggtcaggagttcaagaccagcctggccaatatggtgaaaccccgtctctactaaaaaaatacaaaaattagacgggcatggtggtgcgcacctgtagtcccagctatttgggaggctgaggcaaaagaatcgcttcaactgggaggcagcggttgcagtgagccaagatcgcgccactgcactccagcctgggtgacagagcaagattctgtcccccccgccaaaaaaaaaaaagaaaaaagaaaaaatgttgacaccctaaaagttccacatgggaactcagcaaactgtggtttattgacctaagagagctcagagcagcatgtctcacatgactctaaggaacattgtgttccttgtggtattaacaggtattgctcgaaaaacaggtactatggccaaaaaattcaggaagcactatttttacatgtaaactttctacttatctccaaacctctggcactataatctaaaatccgtaagatattacaaataaatgttgagaaaatctactctcatagtataaaagcctaacttaatttgtggtataatatatgctattaatacctagtagtgatttctagttacacatgacagactgagcatatcagtttcctgccactctctctccagatcctgcttaatcactaaaaggataagcacaaacaagaaaaaaaggaacaggagagaatataacagcaacaaaattttggagctggagagcaaatggttactgactgcacaacaagaaaaagctaaaaattttgcccacaattgaggtcctggaagtagaccagacacttttcaaagtgaaaaaaaggctgggcacggtggcttatatctgtaatcccagcactttgggaatttgaggcatgtggatcacttgaggtcaggagttcaagaccagcctggccaacatgatacaaccccatctctactaaaaatacaaaaattagctaggtgtggtagtacacattcatacattggtaatcccagctacttggaattccgactaaggtgggaggatcacctgaacctgggaggtggaggttgcagtgagccaagatgatgccactgcatcatcttaggcgacagagtgtgactccatctcacaaaaaaaaaaaaaaaaaaaaaaaaaaaaaaaaaaatcaaagtgtaaaaatacaggaggattaactaaaaatctatttgagaagcagtgagagccccttccccactccctgcagtaggaggagtgcgctcttccaccctagaaggtttctgctgtgaaaaggctaaacctgggaggctctggcctcagtgacacctggcacagccctgtagagaacctttggaaaaccaggtcacgaagtagcagctttcgcaggaaagtgtaacagtccatgtcttccccgtccagctctgaaaaggctggcagccaggcttatcatgccttcaggaaagagatggaggaggaagcaactgatcaagagataagatacgctgagtatgatatttggaagtccagcaataaaatggccaggcagatcaccttactgtgaaacccacacaagtctgcaatgtccgtaagggtccattcagtgcccggagcaactaactcagcaaataatcactgagcgtttaccgttccaggctccaaagatgcaacagtaaaccaaatagattaaataaagcttaccttctactgagataaaccaaagacccatgtcaagtactttcagaatgctggggacaaagagaaaatcctaaaagcttcaagagataacaaaataggattgggaatcagaacaacctgagacttctcaacagcaacgctgcaagtgagaagatgatagagcaatggcttcgaaatactcagtaaaaagaaaatgattcccaacctagaatcctatccctggccaaactatcattcaaatgcaatggcagaacagaattatgatatttatttatttttgagacagggtctcgctctgtcgccgaggctggagtgcagtgacacgatctcagctcactgcaacttccctctgcctcccaagttcaagcaattctcctgccttagcctcctgagtagctgggactacaggcgcccgccaccatgcctggctaattttttgtatttttagtagagacggggtttcaccatgttagcaaggatggtctcgatctctgacctcatgtttcacctgccttggcctcccaaagtgctgggattacaggtgtgagccactgcacccggccagaatgaagatatttgtagcctcaaacattttaatttccttgtactctcttagggagctcctgaaaggtatggtccatcaatatgagggaataaatcaagaaagcagatttgaaatctaggaggtacagatataaatcaggatgaggcaagcagagatgccagggctggctgcttatcaagcctagagagcagtcagtccagaatggaatgggaagataaatgccttccagaagatgtctctaggcagataatggaagtaatcacttacctgatgggtttaaacatattaagaaagaattctttttttttatttttgagacagggttttgctctgttgcccaggctggagtgcagtggcatgatcacagctcattttaaactcaaatcccttggttcaagggattctcctgcctcaccctcccaagtagctaggactacaggtgcataccactatgcccagcatttttttttttgagacagagtctcgctctgttgcccaggctggagagcaggggtgtgatctcagctcgctgcaacctctgcctcctgagttcaagccactctcctgcctcagcctcttgggtagctgggattacaagtgtgtgccatcacgcctcgctaattttttgtatttttagtagagatggggtttctactacatccgtgttagccaggatggtctcgatcttctgaacttgtccgcctcggcctcccaaagtgctggctcacaggcgtgagccaccctgccgggccagctaatttttttaaattatttttttagagatggggtcttgctttgttgctcaagctagttttgaacttctggcctcaagcgatcctcctgccttagcctcccaaagtgctgagattacaggtgtgagccatcacatctgagaagggattcatttttttacagaaaagtttcaggataagttggtaataggtacagaaaatatcaactgaataaatataatgattaacaactccaggagggaaaaataaactgtacacacaaaaaaatataatctatgtacacaaggctctactctgaataatatttagatagcaaaagtagtacaaacattgaaaactgatctaactcccaagtatgttagaagaatgaaggtaattgtgtttgtatgtgtgagtatgtgtgtgagtgtgcacatgtgtcagtatatatatgaaaatgggaatgtgtgtgtgtgtgtgtgtgtgtgtgtgtgtgtgtctgtgtgtgtagagggggtgtaagatgattcaattctcaattttttttttttttgagatggagtttcactgttatcacccaggctggaatgcaatggcactatcatagctcactgtaacctctgcctcccgggttcaagcaattctcctgcctcagcttcccaggaattacaggcgactgccaccacgcccggctaatttttttgtattttttagtaaagaaggggtttcgccatgttgcccaggctggtctcgaactcctgacctcaggtgatccacccacctcaacctcccaaagtgctgggattacaggcgtgagctactgcgcccaggccaattctcaattttcacactaggaatgcaagagataacaatataagtaagacatttataactatggaggcaaattgtagatgaaatagctagacgttgaaagtagtttcatctgtgtaatggggaggtgtaggattgctgtttttccttgtcataaattcataccagacattacttaagttgttttttgttgttgttttttttttgagaaagggtctcactctgtcacccaggctgaagtgcagttgtgtgatcacagctcactgcagccttgacctcctgggctcaggtgatcctcccacctcagcctcctaagttgctgggaatacaggcccatgtcaccatgtccagataattttttatatttcttgtagagatggggttttgccatgttgcccagactggtctcgaactcctgggctcaagcgcttctcctgccttggcctcccaaagtgctaggattataggtatgagccaccatacctggcccattacttgaccttttaaaaaactgagatataggccgggcgcagtggctcatacctgtaatcccagcactttgggaggtcgaggtgggtggatcacaaggtcaggagttcgagaccagcctggccaatatggtgaaacctcatctctactaaaaatacaaaaaaattagccaggcatggtagcacacgcctgtaatcccagctccttgggaggctgaggcagaagaactgcttgaatccgggaggcagaggttgcagtgagccgagatcgcgccactgcactccagcctgggtgacagagcgagattccatctcaaaaaaataaaataaataaaaaataaaatactgagatataattggccgggcacggtggctcactcttgtaatcccagcactttgggaggccaagacgggtggatcacgaggtcaggagattgagaccatcctggctaacacggtgaaaccccgtctctactaaaaatacaaaaaattagccgggcgtggtggcaggcgcctgtagtcccagctactcggcaggctgaggcaggagaatggtgtgaacccgggaggcggaggttgcagtgagctgagatcacgccactgcactccagcctgggcgacagagcaagactcagtctcaaaaaaaaaaaaaaaaaaaaattgagatataatttaaatacagtgcaatgtatggatttaagtatatatttaaatgagttttggctacttgatttttaaaactatgttcacttatttgattaaaataaaaatttaaaaaaaatctggcactcatttgaaatgtcttttggtaatgaaactgtgaagtgattaagaaaccctcctaagatgtcctggtgagtttctgccggagtctctctagccagaaaaagggaccattatttaaactggtccaagccagtttatattgagactccaggacagacattttttccagcttgtgggctgcatatttttggactactctttaccttcttccatctttgcattagaaatgagcatctgtctcaaatgcttgaggaggccagcccaagtaaatgtggtgtatgccaatgaattctcagacatgtgaggaatgttacgaacactcagcatcttgaattcaggatggggaactaaatgctccattaagtctcctgtaaagaaaaaaaaatctgaactaatttttttttattctacattgttgccaatagtctatatataaccatgatttgaaggttttctgggccaaatgttttttctcttctcagaccagaattatttaatctttaatataaatacaatttcagagacaatgtctattacacaccacctctttgcttcattttagcactgacttgagcatgagtgagaaaatacactttgccaaaaagcaaactacaatttagaagctgaataactggaaatgtgaatgaaatatttaggtaaactccaggcaaacaaagtaaacatgagaactgatatgcttttcttgtcattctatgttcactaaatattgttatattctttttttttttttttttttttgggatggagtcttgttctgtcgccaggctggaggagtgcagtggcgtgatctcggctcactgcaacctctgcctcccacgatcaagcgattcccgtctcagcctcctgagtagctgagactacaggcacgtaccaccaagcccagctaactttttgtactttagtagagatgaggtttcaccatggtggccaggatggtctcgatcccctgatctcatgatctgcctgccttggcctcccaaagtactgggattacaggtgtgagccaccgcacccaccctactaaatactcttttagaaatgttactagatttttacataccgtatctggttaggtgataatcaaaccctgttaacatgaaagttaatataagccaggcacggtggctcacgcctgtaatcccagcactttcggaggcctaggtgggcagatcatgaggtcaggagtttaagaccagcctggccaacatggtcttggtcttaatagaaacactgtttctattaaaaatatgaaaattagccaggcgttgtggcaggcacctgtaatcccagctacttgggaggctgaggcgggagaatcgcttgaacccggcagacagaggttgcagtgcatcgcactccagcctgggcgacaaagcaagactctgtctcaaaaaaaaaaaaaagttaacatgaaactctatttggaaagaagacaagattagatattccttaagataggaatgtgcctatctttagaaacttgtatttacaatgaaatagaattaaggagaaagggtactttcctttacatttacagctgtctcatatgtttatagaaaataccttgaggatagggaaaaatatattaccataatatgaaacaaactttataacactgagtacaaactcataatgtacatcctaaagaaaagaacaaattttgacacaaacatctataagatgctacacaggcgggcttgtgctaatggagtgtcctctaaatgtagaattcttttctgtaaaatacctagagttgaattctattgcatagcacaagtaaatatagaatagtcagaaaataattcatgagcactaaggcatgaattcttttttttttctttttagacagtgttttgttctgttgtccaaactggtgtgcagtggcgcaatcaaagctctgcaacctcgaactcccaggcttaagcaatagccccacttcagcttccctagtagctgagattataggtgcacaccaccatgcctaactgtttgttttttttttgtttttttttttttgagatggagtttcgctcttattgctcaggctggagtgcattgcatgacctcagctcactgcaacctctgcctcccaggttcaagcaattctcctgcctctgcctcccaagtagctgggattacaggcatgtgccaccatgcctggctaattttgtattttttttagtagagacagtgtttcgccatgttacttaggctagtctcgaactcccaacctcaggtgatctgtccgtcttggcctcccaaagtgctgggattacaggcatgagccaccacacccggccactttttaaattcttagtagagatgaggtcttgctatgctgctcaggctggcttcgaactcctggcctcaagcgatcttcccaccctggcctcctaaagcactgggattacagaagtgagccatggtgcccggccaatgcatgaatcactaattgttgcaatctgttctcccttccagctttcttgttcagctactcttaccttaaccattcttttttttttttttaaatggagtctcgctgtcgcccaggcaggagtgcagtggtgcaatcttagctgactgcaacgtctgccttatgggttcaagcaattctcctgcctgtcttctgagtagctgggattacaggtacccaccaccatgcctggctaatttttgtattttctgtagagctggggtttcaccgtattggccaggctggtctcaaacttctgacctcaggtgatccaccctcctcagcctcccaacgtgctgggatacaggcgtgagccaccacgcctggccaccttgaccattcttaaacctccttgagactttaatccatggagcacctgcctttcaatcaatcagtcttcctctttctggcaaaatcccagtcttcggccaaccctgctcctcaccttctctgtcagagcacaactacggaaagtcatgccacatggcagactcggacctctttgaattcccaatcaccaaacacaatgctgacgcgcacattgacaactctggatgagatgggaaacctcaggaaggttctgaaaaggggagcaacaggatctgacttatgcttttaaaaactgcaaagccagagttcagtctggctgctgtacttaagaaaaggctagggccgggtgcggtggctcacgcctgtaatcccaacactttggaaggccgaggcgggtggatcatttgagaccagcctggccaacatggtgaaactccgtctctactaaaaatacaaaaatcagctgggcatggtagcacgtgcctatagtgtagtgtagtcccagctactcaggaggctgaaataggaaaattgcttgaacccaggaggcagaggttgcagtgagtcaagatcgtaccactgcactccagcctgggcaacagagtgagactctgtctcaaaaaaaaaaaaaaaatcattgacttgcacactttaaatgggtgaattgcatgttaggtgagttatatctcaacatggtttctattaaaaaaagaaaaaaaagaagagaaagaatcctgaagagcagtggatacccactgccctttagcaacttctcaaagcttttcaataagacagttcagagaactagcagatgtgaagaaagggttttgagatgagcaagacttaagtgtatcttcaggcagaggaggagacagaaagaataaactttgaagctttcagaacataaggctttcctataattaacgtatagagggacaaatacctagtggatttcgtctgtagtgaaatgagctttctgcagaataagtaggctggaacacacttcccagctgatgtgcgaggacttgattgatatcactaaaggagatctgcttgatattcatcagttttgcacagatcttatggatggcatcattctcatgaagaaggagggcgtctgaagatcggtacaagtgagaaagtgtcaaaatggagttgtagttttgaacaataacctggagaggaaaaggtcagaaaaaagaaaggtaggagagaataatggttaagattacagattctcaaggcatcctggcagggttcaaatccgggctctgtcactttctagccgtatgaccttggacaagttttttaatctctatgctcagtttcctttttttttttttttttgagatagagactctgtcgcccaggctggagtacagtggcaccatctctgctcactgcaacctcggcctcccggttcgagattcttgtgtctcagccccgagcagctggaattacaggcttgtgccaccatgcccagctaatttttgtgtttttagtagagacagggtttcaccatgttggccaggctggtctcaaactcctggcctcaagtgatccacccccttgtcctcctaaagtgctgggattataggcgtgagccaccgagcccaaccagtttcctcatttgtaatggcttcctagaactgtaaggattaatgatataatgcaagttaaacacttagaacaatgccttgtatgggcacaacaaaaattggccattattatcatacttatctcctatttcatttcctatagtgacttgtctcacctgatttgtttcttcagctaggttgatcaacaggaaattggcttatatagaaattttcaagctgggagcggtagctcatgcctgtaatcccagcactttgggaggctgaggtgggtggatcacctgatgttgagggttcaagaccagcctgaccaacatggaaaaaccccccacctctactaaaaatacaaaattagccgagcgcatgcctgtagtcccagctacccgggaggctgatgcaggagaatcacttgaacccgggaggcggaggttgcggtgagccaagatcgtgccattgcactccagcctggacaacaagagcaaaactctgtctcaaaaaaaaaaaaaaaaaggaaagaaattttctcccaatggaaagaaataaaaattacttgagggtggcaatggcaccatgaatcccaacatgaggtcaaggtgtctgctttatgtactggagtgagagacattctcagcaatcagttcctgaaagaagcacaatcatcttctctgacttttttttgaaacagagtcttgctctgtggcccaggctggagtacagtgacatgatctaggctcaatgcaacctctgcttcacaggttcaagtgattctcctgcctcagcctcccgagtagctgggacaacaggcaggagccaaaacacctggctaatttttgtatttttagtagagaaggggtttcgccatgttggccaggctggtcttaaactcctggcctcaagtgatctgcccatctcagcctcccaaagtgctggtattacagaagtgagccccaactgcctggccattctctgaaaaaaaatttttctttttttttttaagacgggagtcttgctcttgttgcccaggctgaagtgtagtggcttgatctcggctcactggaacctctgtctcccgggttcaagagattctcctgcctcagcctccaggtacctgggactacaggtgtgtgccaccacacccagctaataattgtatttctagcagagatggtgtttctccatgttggccagggtgatctcgaacttctgacctcaggtgatccatccgcctcggcctcccaaagtgctgggattacaggtgtgagccactgcgcccagccattctcttaaaaaaatttttttttgagatggagtctcgctctgtcgccaggctggagtgcagtggcgggatatcagctcactgcagcctctgcctcccaagttcaagcgaaatctcctgcctcaacctcctgagtagctgagactacaggccagcgccaccatgcccagctaatttttgtatttttagtagaaacggggtttcaccatgttggccaggatggtctcgatctcttgacctcatgatttttccaccttggcttcccaaagtgctgggattacaggcgtgagccactgcacccagcctctctgaaattttaaatgcaaggatacctcatctgtttggaaaagtttaagggaagatatatatataccatatataatatggtactcatattaaataaccattctggaagccataacttaacatttccaatgaaagggtgagcacaatctttatttttatttatttatttttttttgagacggagtcttgctctattgcccaggctggagtacggtagcgcgatcttggctcactgcaagctccgcctcatgggttcacgctatactcctgcctcagcctcccgagtagctgggactagaggcgcccgccaccacgcctggctaattttttgtattgttagtagagacggggtttcaccatgttagccgggatggtctcgatatcctgacctcacgatccgcccgccttggcctcccaaagtgctgggattacaggcataagccaccgcacctgggtggtgagagcaatcttttacccatatttatttctattgcaaagaacataaaacataaacttttcaattaacatgtccatacctcaccagttccataaggccaaataatctgattcattttcaatgagtttgagtactgatcttctaaattctgtgtaacgaaagctcctaatcctgatcctgtgcccccagccatactcattatgatgaaaaaaccactgaaagagtcacatttctccacttccttccggattatgttcattatagattcttcatgcctgggtccatgaacagagtaactatgcaatggcaaaagaaacaaacacaaacacttttcaatttaaccacagatatgtaattcagagagaaagatacaggatagagaggttttttcaaaactacggaagtgaaggaactctcatgaaaggtacaggtaccctgactgacaaaattttaaatacataagttgaatatatttaacccacttatgcctagtgttccattattggaacgctaagcatgtgggagttatttatatcctattgctcaaggttattgctaaggtcggatttttcactcatgcaaaaatttaaaaaattgcaacctctggcataaatgggttaacaggcgaacaggactgctagcagagggaatttacagagtatagaaagttctctttatttttgaggttttaatcagatactttaatatttggggttttcatagctgtacttattttgggggtacatgtgatatttggatatgtgtatacatgtgtaatgatcaaatcagggtaaatgggatatctatcacctcaaacatttattttttctatgtgttgggaacattacaattcttctctttaagctattttctttttctgagacagagtttcactcttgtcaccagggctggagtacaatggcgcgatctcggctcactccccctcccgggttcaagagattctcctgtctcagcctcctgagtagctgggattacagatgcccgaaccacaccaggctaatttttgtatttttagtagagacggggtttcaccatgttggccaggctggtctcaaactcctgaactcagatgatcagcctgcctcaacctcccaaagtgctaagattagaggtgtgagccactgcgcctggccgcttttactattttgatatatacaataaattattgttaactataatttcctaactgtattattgaatactagagtgtatttcttctaactgtatttttgtacccattagcaacttcttttttttttttaaacagggtctcactatgctgcccaggctggttgtgaactcctggcctcaagcaattctcctgcctcagtctcccaaagcgctggaattacaggcatgagccactgagcccagtgagcaacttcttttaatcttcctctaaaagctctcttttgtaggctattttctccttttttattttttttgtttttgtttttgtgttttttgaggcggagtctcgctctgtcgcccaggctggggtgcagtggcaccatttcagctcactaaaactacctccgcctcccaggttcaagtgattctcccacctcagtctcccgagtagctgggattaaaggtgcgcgccaccacacccggctgatttttgtatttttagtacagacagggtttcaccatgttggccaggctggtttcaaactcctgacctcaaatgatctgcccacttcagcctcccaaagtgttgggattacaggtattagccacggcacctggcaccccccatcccacatcttttttcctttttgagttagggtcttactccgtcacccaggctggagtgaaatgtgaagtgcagtggcaaaatcacagctcactgcagccttgtcttgacctctcaggctcaaaaaattatcccatctcagcctcccaagtatctagaactacaagagcatgtaaccatccctggctaatttctttctttttttttttttgagatgcagacacgccctgttgtccaggctggagtgctgtggcatgatctctactcactgcaacctctgccacttgggttcaagtgattctcctgccttagcttcccgagtagctgggaccacaggcacaggccgccacgcccagctaatttttgtatttttagtagagacagggtttcaccatgttggccaggctggtctcaaagtcctgacctcaagtaatccgccctccttggcctcccaaactgctgggatcacaagcgagagccaccatacccagccgcccggctaatttcttttttcttttttttgaggcagagtctcactctgttgcccaagctggagtgccgtggcacaatctcggctcactgcaacctctgcctcccaggttcaagtgattcttctgcctcagcctcccaaggagctaaggccacaggcacaggccaccacacccatctaattttttttttttttaatattttttgagatggagttttgttcttgttgcccaggctggagtgcaatggtgtgaccttggctcactgcaacctctgcctcctgggttcaagcgattctcctgcctcagcctcccgagtagctgggatggcagccatcaccacgcccagctaattttttctattttttagtagaaacagggttttaccatgttggccaggctggtctcaaactcctttcctcagatgatctgcccacctcggcctctcgcaaagtgctgggatgacaggcgtgagccactgcaacaggcctaatttttgtatttttagtagagatggggtttcatcatgttggccaggctggtctcaaactcctgacctcaagtgatccaccttggcctcccaaagtgttgggattacaggcgtgagccactgtgcctggcctcacctggctaatttctttttaaaattttttcgtagcgatagggcctccctttgttgcctagggtggacttgaactcctgggctcaagcgatcctcctgccttggcctcccaaattgctgggattacaggcatgagtagtggccattcctttacctggtaggtaccaggtagttctacaagttttgataccaggtagttctacaagtttatgatacagtataacatttaatattcctaacagtcctgaaacagtggttctcaaactgtgctgcacatggctgggcacagtggctcatgcctgtaatcctagcactttgggaggcggaggtgggtggatcatttgaagttaggagtttgagagcagcctggccaacatagggaaatccagtatctactaaaaatacaaaaattagccgggcgtggtggcatgtgcctgtagtcctacctactcgggagactgaggcaggagaatcacttgaacccgggaggcagaggttgcagtgagccgaaattgcaccactgcactccaacctgggcaacagagcaagactcttgtcttaaaaaaaaaaaaaaaaaattttgctgcacattaaagtcacctagggacctttaaaaaatcccaacatcaggccaggcgcagtgactcacgcctgtaatcccagcattttgggaggccaaggcgggtggatcacctgaggtcaagagttccagaccagcctggccaaactggtgaaaccccgtctctactaaaaaatacaaaaattagctgggcatggtggcaggtacctgtaattccagctactcgggaagctgaggcaggagaatcacttgaacctgggaggcagaggttgcagtgagctgagattgcgccactgcactccagcctgggcgacagagcgagactccgtctcaaaaaaataaaaaatcccaacatcaggctgggtgcagtggctcatacctgtaatctcagcactttgggaggccgaggcaggtggatcactggaggccaggagttccagaccagtctgggtaacatgctgaatccttgtctctactaaaaaaatacaaaaattagctgggcatagtggtgcacacctgtagtctcagttactcagaaggctgaggcaggataattgcttgaacccaggagatggaggttgcactgagtcgagatcatgccactgcactccagcctgggtgacagaacgagactctgtctcttaaaaaaaaaaacaccaaaaacccaacatcagggctttaccccaaaccacttaaatcagaatctcagcagaagggaaatgtgaaggtgaagatggcagtggccagggccagggtcctgggagtccagtggatgcaaagggcatcccagaaagtggtgccgctgggcgcaaggacagcctcccgcataaccaatgacatgctctcagggtcctatcctaggacgccaaaaggacaggccactgccctcaagaagtataacatgtgtgtgggagactacgagccttacccggatgatgacatggggtatggcgactacccaaagctccctgcatgagagggatccatggtatagctgggaccagctggacctgagattgaactggggtgaaccgatgcactggcagctagacatgtataccaggaatatgtcccccacacctgtttcttggaatgtcatgtgtatgcagctgttcggcttcatggctctcatgatattcatgttctgggtgggggatatgtaccctgtctaccagcccgtgggaccaaagcagtatccttacaataatctgtacctggaacgaggcggtgatccctccaaagaacctgagtcggtggttcactactagatctgaggaggcttcgtgggcttttgtgccctctaactaggattccctcattcctagaaatttaaccttaatgaaatccctaataaaactcagtgctgtggttaaaaaaacaaaacaaaacaaaacaaaaatcagaatctctcaaagtgagccctaggcatcaggacttttccaaagaacctcaggaaattctaatgtgcagcaaagtttgggaactactgtcttgtagtattctctatcattgagatatctgccagatatggacattacattggtaagttagtttgcagcatgacagtgagaagatggaaaaccctgctgaaagatatccttcatttcaacattacctgtaccttaagtacagacataggcatggaatgaaagtttcttctgggtaaaataaaattctaaatctaaaacagcaatttcaagattatgtgcttggtatatcaactatacagttctaactttgctatctattaattgactgtgtagctgtcactaaactgaaaatcacaagaaattattcttacccatatgcccagttgtttccagaaccttgtttttgacagaagcatgcatgttgaccatatttccattggccagactgggcagcctttgacagcatttgattgataactttgggttccatgtcaacaagaacagcccgggcaattggaactagagggggaaaaaaacccaaaaacatcgaaagaaaaaaagatttattatgtcttatttgggtaactcagagcatctaagtgtccaaatccaaaaaaaaaaaaaaaattccaggggttgtggttagaaagatctgtcgtactgcttagaaatctcagtgggcagcagcaggcatatgcagatgttcaccaagcccagcatttgctaagcaggctgaatcagtgtgggcctaaaagagtacctgggtcagattagccggcgtggtggcatgtgcctgtaattccagctactcgggaggctgaggcaggagaactgcttgaacctggaaggcggaggttgcactgagccaaggttgcaccactgcactccagcctgggagacagagtgagattctgtctcaaaaaaaaaaaaaaaaaaaaaaaaaagagtacctgggtcaggtctacaaacatatgctgaatgcttatgatgtgccatggactgtgctgggaatttggagatgaagacatcaaactagccttagaaagggcaggtgggaggctgggcgtggtggctcatgcctgtaatcccagcattttgggaggctgaggcaggtggatcacttgaggccaggagttggagaccagcctggccaacatggtgaaatcccgatcctactaaaaatacaaaattggccaggtgcggtggctcacacctgtaatcccagcactttgggaggccgaggcgggcggatcatctgaggtcaggagttcaagaccaaactggccaacatggtgaaaacccatctctactaaaaatacaaaaaattagctgggcgtggtggcaggctcctgtaatcccagctactccggaggctgaggcaggagaattgcttgatcccgggaggtggaggttgcagtgagccaagattgagccattgcactccagcctgagcaataaaagcaaaacactgtctcaaaacaaacaaacaaacaaaaaacaaaaatacaaaattagcaagacttggtggcgtgtgcctgtaatctcagctactcaggaggctgaggcacgagaattgcttgaacccaggaggcagaggttgcaatgagctgcaatcacaccactgtgctccagcttgggcaagagtgagactctgtctcaaaaaaaaaaaaagacttgtgggaaagataaatacatcaatacttaatcacactgcaacgtgatatgaccaaataaatccacaccaaaggaacatcatatttagaggtacaaagtaccatgggtacaacatccagctcagaattgttggagcagaggatggagaaggagagggtagaagtgatggatggggatgaaaagcaggtagggctcaatcttggaaatctttataggcaatgctagaaaagcctgaactttatcttttaggccatgattaaccaccaaaaattttcaagcaggcgaggaatagttaaatgtctgtcaatcataattcactgcagcctcaaactcttgagctcaagcaatcctcccactttggccttctaagtagctgggacttcaggtgtgtgccattacacctaactaatttttattgtttttttttctagagacagaatcttgctctattgcccaggctggtcttgaattcctggcctcaagcaatcctcccaccttggtctcccaaaacactggaattacagtgagacactgtgcccagctgttagatgtcttttttttttttttgagatggagtctcgctctgtcccgcaggctggagtgcagtggtgcgatctcagctcactgcaagctccgcctcctgggttcacgccattctcctgcctcagcatcccaagtagctgggactacaggcacccgccaccacgcctggctaatttttttgtatttttagtagagacgggattttactgtgttagccaggatggtctcgatctcctgacctcatgattcgcccgcctcgacctcccaaagtgctgggattataggcatgagccactgcacccggccgatgtctttttaaacacagcagtacggaggatggatgtgatagacagtagactccaggcaaggaatcctaaaaggagtgtcttgagacagtccaggtaagaaagaacaaaagccagactaaagcaagtcagtgaaggtggaaagggaagaacagtttcaaggagtatataggaggtcaaataagcagatcttgtttgatggtatgtatgcagcaagagcacaaggaacaataatgaatgccttgggaatagagatgttgagtttcaggttcatatgagagatgtgggtggagatatccactaatctgtctagagcttttaagagaggctgggctagaggtctgaaagtcacaggtgtaataaatgtagcaaactatgacagtgaagttgcccagagagaactatgcaagtgaggacaggggagatgcaacaactggagaagaaaagtggggtgactaggagaaggaggttcaaggagagagttgttttttgtcttttttttttcttttttgagacggagtttcgctcttgtcacctaggctggagtacaatggcacactctccgactcccgggttcaagcgattctcctgcctcagcctcccaagtagctgggattacaggcacgcaccactacgctcggctaatttttgtatttttagtacagatggggtttcaccacgttggccaggctggtctcgaactcctgacctcaggtgattcacccacctcggcctcccaaagtgttgggattacagggatgagccaccatgcctggctttttttttttttttttttttttgagacggcatctcgctctatttcccaggctggagtgcagtggcgagatctcggctcactgcaacccccctcccgggttcaagtgattctcctgcctcaccctcccgaataactgggattacaggtatgtgccaccatgtccggctaatttttgtatttttagtcgagacggggttttaccctgttggccaggctggtctctaactcctgacctcaagtgatctgcctgccttggcctcccaaagtgctgggattataggcgtgagccactgcgccctgctggaaagagtttttatacgttactgttatcaaacgcagtagaggagtaaagtgaattaagaaaagaaagagaggctgggcacagtggctcacgcctgtaatcccagcactttgggaagctgaggtgggcagatcatttgaggtcaggagttcgagaccagcctgaccaacatggtaaaaccccatctctactaaaaatacaaaaaaattagttgggcgtggtggcgcatgcctgtagtcccagctactcatgaggctgaggcaggagaattgcttcaacctggtagtcggaggttgcagtgagccaagatcgcaccactgcactccagtctgggtgacagagctagactctgtctcaaaaaaaaaaaaaaaaaaagaaaaagaaaaagaaagagagcctgtaatcccatcactttgggaggccaaggcaggcggatcacttgagatcaggcattcgagaccagcctggccaacatggcaaaaccctgtctctactaaaaatacaaaaattagccagacatggtcgtgggcacctgtaattccagctacttgggaggctgaggcaggagaattgcttgaacacgggaggtggaggttacagtgagccaagatcacatcactgcacttcagcccgggtgacagagcgagactctctcaaaaaaaaaaaaaaaaaaaagagagacagagaaaagaaagagccaggcatggtggcatgcacctgcagtcccagctactcaggagacctgtgaatagccaccgcactccagcttgggcaacatagtgtagtaagaacctgtctctacaagaaaaagaaaaaaagaaaagaaaaacagtagttggatctggtgattcggaggtcactggaaacttttcttagagcagcttcaatgatgctatgtggggcagaagcaggatcataggtggttaagcagggtccttttattttttttggagatggagtctcgctctgtcaccaggctggagggcagtggtgcggtctcggctcactgcaacctctgcctcctgggttcaagtgattctcctgcctcagcctcccgagtagctgggattacaggcacatgccaccacgcccagctaatttttgtatttttagtagagatggggtttcaccatgttggtcaggctggtcttgaactcctgaccttgtgatccactcgcctcggcctctcaaagtgctgggattacaggcgtgagccaccacgcccagccagcagggtcctcttttgagaatcttagatgaaaggcaaagagataagaagaagaaagccagtcaatagatgagttttgtttggttggttttaaattggtgagatctgagcatgcagaagggaaaatgccactggaaaagcaaagattattaacatagaaatgaaaagcaaaaacaaagtaattccctagtgagatgggaaggaatggggtttaaaaaccatgtggaaggcctggctttgaaggggttggttagatcagagtaaaggagaggactgtgggccacacctacctccattctcctcctcactgaagaatctttctttgcaagatgcttgatatgcctcattctctctcatagagcagagtccctgggaactgtgtgagtcactaagcaaagcatcaaaaacttcaaaaccaatctgattgccacactgaccaagttgcactgttacaattgacatgctgagccacaaactaggtgtattacctctaaaaacaacctgtaatcgaaaaaaatacgctttgagaaccactacattactaataagaacaaataaaatgccatgtatgttaattatacatcaataaaaagtcttttttcccccctgagacggagtcttgttctgtcacccaggctagagtgcagtggcatgttctcggcttaatgcaacctccgcctcccaggttcaagcgattctcctgcctcagcctcccgagtagctgggattacaggcacgtgccaccacgcctggctaatttttgtattcttagtagagatggggtttcaccatgttggccaggttggtcttgaactcttgacctcgtgatccacctccacctacctcagcctcccaaagtgctgggattacaggcttgagccaccacgcccggcccaaaaagtcattttaaaatgccacatacgtatataatattggagatagaacagctgtgttgtctaaggagctagtcattcaaggaagttctcatactctctacatggttttgggatttgtgatttactgtacctgaatccattcatacacagctcaatagtttccaaaatctgatttgtaatcacttttttcctaaacatatgtttaaaacaaaacattctcctcagttgaggagtgataaaagaaaaaaagaggctgggtgcgtggctcacacctgtaatcccagcattttgggaggctgagttgggagaatcacgtgagcctggctgttccagacctggtcaacatggcaaaaccctgtttgtacaaaaaatacaaccattagcttggcgtggtggtgtgcgcctgcagtcccagctactcgggaggctgaggtgggaggatcccctgagcctgggaggtccaggctgcagtgagccaagatcttgccaccgcactccagcctgggtgacaaagtgacatcctcctgtctccagaaaaaaaaaaaattaaaattaaaaaaataaaaacaagacaaaacaaatgctgattgaagaaattagtagtaccacccttcacaccacatgaacatgtagaacacagaagtgtgctcaacattgtacattcaattaacattaattttctctcttctaaataatagcttacgctttctccactagtctagcctggtaactttagtaagacctgtaagaaagattttgtgtttagctcaggtaggacagcaagaaagatgcagcttggagaaagaaaaccagatgaaatattaaccgggcgcaatggctcatgcctgtaatcccagtactttgggaggccgaggcgggaggatcacctgagcccagggattccagaccagcctgggcaacacagcgagaccctgtctccatttgaaaaagaaagaaagcaaaagaaacattagagcagttcctcattatttttacctaggaaaagacaagttttgataaagacttcacatcaggtctatgcagcactggaaatgagccgtgggttgtgagacagactctgtgcttaaaatgtcaaaccggcaaagtaggtttattattatcctcattttacagataaggaaactgaggctctgaaaggttattgacttttccaaggccacagaactagtaaagagcaaagccaaaaggtcccccgttccccacgggccccaggagttctccacacgtaacccgactcaccgccagacgccgaccagcgcttctgtccggttcaaacttcggaccaacctactcaccatgcgcatgctcactttcaaaacgaaaaacttactgagaacaaatgcgcatgttccataaacggagagttttgttgtgtatatattttttcctattcagaaagattaattacgcatgttcaatttcaatttacgaacttcagatatggtacgcatgctcactgtccaccgaacgctccagctgacaatgcgcatgctctagtcctccaagcgcgacttcggctggtgttttgcgcatgtttctgccagcgcctggatcctgccgatagttctgcgcatgtccactgcccactgtttggcttcacggaaccctgtacgcatgctcctacgctgaactttaggagccagtctaaggcctaggcgcagacgcactgagcctaagcagccggtgatggcggcagcggctgtggtggctgcggcgggtccgggcccatgaggcgacgaaggaggcgggacggcttttacccagccccggacttccgagacagggaagctgaggacatggcaggagtgtttgacatagacctggaccagccagaggacgcgggctctgaggatgagctggaggagggggtgaggcccggggtccccgggggcccgaggtgacagggccggggcggcggcgcgggctcaggaagcgcggtgtgtcctagagcgtggagacccaggggggctcctgaggagctgagggtcgcgcggcctgagacaggggagcgggcggggcggtcatggccctaggtgtgaggcctctgcggggctcgcaggtgcaggtcgcacccttagccccaggtcagcgcagccccgagcgatctgaagagggaaagagaacgggcgcgtggtcgattcctcgagctgttggacttgagtgtggcggggagcgggtggcgtgagcgtgtgttggggagacgggggctgctcttgctgggtgtcccgtaagtgcaggcgaagtgtggagggtttcccttcgagtctagaatttcaagtattgaatcttcagacctcccacaaccacctctcttctcggcctgtcgcttctctcctaggaagcgctcagctgttagaagtgacagctgaaaacttctgtcgggagtagcactgccgctgctgttacagccaccaggagttttatttcgggagcaagggggctctgctgcatcttccaatcttccagggtttgtttgtttgcttttttttttttacccccttccgtgtgactttttaaaataagcatttataaggacacacggcacttgtaacctttccccaagttgaagatgtctgtatttttttcagaataattaatgtaattttgaggtggaaaaaaaaaccaaaaaccagttgacagccttgatttagcttgccagaaataagttgcctgaacagagacttgtgaatggtggtatgagggctttccttgctgtaatttagggtgctaaatttagaattgtatttcctaatgcatagcttggtttcaccctgctggcttagtggtttgttaatctttatggaataactttttttttccctagataaatttatcaaaaaatgacaaattgcacctgaagttcaaaaatgttgtcatactaaatcactgatcctggaccaaatgatcatcagttgataacctcttggtagtttagcatctaaattccaatgtctagttgaatacatgggttaatgacgtcagatgtttgctctaattacacaggggcttcctttcccttgcctcaccctcagtttttctcctctggcacctgccctactgttgacaaaagattgagatgatgtatataaagaattttgaacactttaagaaactaagtggcctaaaataatactgttcttcttgtttgtttcttttgttttgttttgagttgggtctcactctatcacccagactggagtgcaatggtgcgatctcagctcactgcaatctcagcctcctgggtttaagcgattgtcatggctcagcctcccaagtagctaggattacaggcatgcgccaccacatctggctaatttttgtatttttagtagagacagggtttcaccatattggccaggctgttctcggactcctgacctcaaatgatccaccagcctcggcctcccaaaatgctgggattataggcataaaccaccatacctgaccaatactgttcttttcataatcaaataagactaaatcaaaatcacacggtttagaaagtgggtattgagttgtgtgctttttcttttcttttcttttcttttctttctttctggtttttttgttttgttttgtttttgagacagtcttgctctgtcacccaggctggaatgcagtggcgtgatctcagctcactgcaacctctgcctcctgggttcaagcgattctcctgcctcagcctcctgagtagctgggactacaggcgcgtgccaccacacctggctaattttttgtatttttagtagagatggagtttcactgtgttagccaggatggtcacgatctcttgacctcgtaatctgcccgcctcggcctcccaaagtgctaggattacaggtgtgagccactgcgcctggctttttttttttttttttttttgagacagggtcttcctctgtcacccaggctggagtgcagtggtgcgatctcggctcactgcagcctctgcctcccaggttcaagcgattctcctacctcagcctcccaagtagctgggattacaggggcgcgccacatcacctggctactttttttgtattttagtagagatggggtttcaccatgtggcccaggctggtcttgaacatctgacctcaggtgatcacctgcctcagtctcccaaagtgctgggattacaggtgtgagccaccccaccaggctttttactttattttattttaattttttttgagatggagtctcactgtgtagcccaagctggaatgcagtggcctgatctcggctcactgcagcctccgcctcctgagctcaagcgattctcgtgcctcagccttccgagtagctgggactacaggcgcgcaccaccatgcctggctaattgtttgtattttagtagagatggggtttcaccatgttgcccagggtgggcctgaactcctgagctccagcaatctgccagccttggcctctcaaagtgctgggattacaggcgtgagccactgcatccggttggtgtgtgctttttcaatgatgttttcatgcagaattccaattagcctcttaatcgaacataatggtacactagttacaattggaaacaaatatgagattactttcattatttataccatataccatactctttatcagttatgttggttctctatgacagtggctttggagcagggcaggggagaaaactggataggaaggtgctttatatcttcattagttgaactgatagaatttccagactgggtttattttattttatttttttttcttttctgagacagagtcttgctctatttgcccaggctggagtgcaatggcgctatctcggctcactgcagcctccacttcccgggttcaagcgattctcctgcctcagcctcccgagtagctgggattacaggcacccgccaccaggcccggctaatttttgtatttttagtagagacggggtttctccatgttggtcaggctggtccggaacttccaaacttgggtgatctgcctgccttggcctctcaaaatacaggtgtgagccaccgcacccagccaggtttattcttttttgaaagtacagtactctgttaaaattcctgtgtaaactgggacttttcttttcactttcttgtgtttcaagaacagtaggtgttccagggcttttgtcctgctgggtacaagcaagtaggattttgagaaggtgtgaggaggaggtcagaaaaattggtggaaataggaaagagaaagaaatatggccccgattttggggagagaaagtctggggaaagagcaaaggcaattaaagaggattttgaggaagagacttctgtaaaatatgtcttagcaacactttttggagttgaaaatatttctttttagtgtgttattttttctaagaggtgcctcaagatggataatggaagatttggagtacgattgggttgacaatccaaggagattcggtgacatccagattaccctgaaataaaaaaaaaaaaaaattctggaaaatgagagaagtttagattcttagaaaatcttctgatagtttctatttgtgaatttatagactttaatttattacacaaagtttttaaacattggtgcatatcagttttcctcattttatagtaaggaaactgaggcataggccatatgatagccaaagatcacatagtggtagtgtcttctgacttaattcagcaggcttcattgcacaggttcttcattgcatttactagttgtgtttataatgttcctctttgtggtatgtcaaaagtgaattcagattcctttggccatactcactctgtgacctggagtaaattccttaatctctaatgttttctataacatgagggttacattaaataagtacgtaaagtacagtactctcaaaatatcctggcgtattaagcaattagctagttcacagaaattcagcttgtcttgtcattgctaaggaaccaatcattcaggtttaacctcgtatacctagagacttaataattgcagttaaactcgaggtgctgtatttttacaactgtagtatcatagtgtgtatttttttttaaaactaattgatcccgtttagagagatgtgcctttcaaggtacgttacagagtgactatgcgttagtaaatataggtatttccatagtttatttaattagagattaaaagatgagactaaatgatacatttatggacaaagttgaatatctgccacctaacttaaaaaagatcctgtttaaggccgggcacagtggctcatgcctgtaatcccagcactttgggaggccgaggcaggtggatcacgatgtcaggagcaggagaccagcctggccaatatggtgaaacccagtttctactaaaaatacaaaaattagccaggcatggtggtgcacacctctagtcccagctattcaggaggctgaggcaggagaatctcttgaacctgggaggtggaggttgcagtgagccaagatcataccactgcactccagcctgggcgacacagtgagattccgtctcaaaaaaaaaaaaaaaagattctgtttaaatatctcagaggaatataatcaaagcctattggtaagaggggagtttttgggcggagggtgtcttttttgtttgtttttttgtttcactgttgatgatatcatttggggcagtaaattgaaactaaggaaaagttttccttcagagaatttagattgcaaaaatgttggaatcttctctgctctctatagcattaagagtagtagaaaactgtaatgcaatttaaaaaattctcactttgtactctaattcaaaatttgaaataatcacgcaggcttactgtacaagtttcagattgggacatcagatttttattgagtaaaaggtttaaaatttttgaaaaccaaagtgctatatagatagtatatactcaaatattcatgattatgaaaaattatagaaaaaatatcaatacttatcttgctttgtaatatatacttactataaagcagcaacttttttttattttttatttttttgagacggagttttgctcttgtggcccaggctggagtgcagtggtgcgatctcggctcactgcaacctctgcctcctgggttcaagctattctcctgcctcagcctcccgagtagctgggattacaggtgccgactaccacacccagctaattttttgtatttttttggtagagacggggtttcaccatgttggccaggctggtctcaaactcttgacttcaggcgatacacctgcctcggcctcccaaagtgctgggattacaggcatgagccaccgtgcccggccagcagcaactatttttaaatagcccaagagtttaggcaaagttctaccctttcttccatttcctctaagttactgaatcttgtcaatcctaatgaacacagcagacattggataggccataaagcttaaggcagcagaaaaaaattaggagtaaagagtttcctggccaggcggggtggctcatgcctgtaatcccagcactttgggaggccaaggtgggcagatcacctgaggtcaggggttcgagaccagcctggccaacatggtgaaaaccccgtctctattaaaaatacaaaaattagccgggcctggtgtcaggcacctgtaatcccagctactcgggaggctgaggcaggagaatcacttgaacctgggaggcagaggttgcagtgagccaagatcgcgccattgttctccagcctgggggacaagagcaagacttcgtctcagaaaaaaaaaaaaaaggagtaaagagtttcctgtgaaagagagttgtcagtatgtattacataatgttatttgacacttcttgtgtgagccttctagaggtaacactgagtagcaggaaagatttgtgcctcaaatgcttctgtcctagacagtaacggtagaagttattagcacaatatgcaggtgccagcattataggtctggccagcttaggaaatgaaacatagctacagggcgtatcttgtgaggtggcttcaaaatcatggtccagtcttaactactctgtagtctttaatttagaattaagtaaaactaacattaaagaaaaaacaattatgtaataccagttttatcacatctggaagaagttagtcttttgtcataaaagtgaagccatcctaggcgattacgtagagcaacaaagacaaaaaaaacctttaaccatgaccacccccatatcccacacataaaagaaactgtatccagttaaaatggtgagaattggttttttcccccttgatactgccccatctctttgcctgggtataatcatgaagtgtacattcctggtattacatgttatcgtgatttggtcacaccatgagtgagttatgactaaaattttgtgttttgggggcatttgaacatttattctataagaatactatcagtttttggctgggtatgatagctcgtgcctgtaatcccagaactttgggaagctaaggtggaaggatcatttgaggccaagagttcgagaccaacctggccaacaaaacaagaccctatctgtacaaaaaattaaaaaaataaatagtgggcatagtagcacacagcacacgcctggcactagtgactccagaggctgagaagagatgatcactggagcccaggagtttgaggatgcaatgagctattatcctactacagcactccagcctgggtgacagaaacctaattgctaaacacacacacacacacacacacacacacacacacacacacacacacacacacacacacacccctatgtgtttttgttgtgtatgttggctgtgtactggtagttttgaagaaagatatattcactttaatatcttaactactctaaagttttgacatgattgcttaaagacttgtaatgttttagagtctattttctttttctttttttttgagatggagtctcactcttgtcatccagcctggagtgcaatggcgcgatcttggctcactgcaacctccacctcctgggttcaagcgattctctttcctcagcctcctgagtagctaggattacaagtgcccgccaccaggcctggctaatttttgtatttttagtagaggcggggtttctccatgttggccaggctggtctcgaactcccaatctcaggtgatccgcctgccttggccccaaagtgctgggattacaggcgtgagccacgcgcctggcctggagtctattttaaattaattagtatcctttcgtgtaaactgagagttcataatcagattagattgattttaaagctatatattataatgtcagtaactgaaattctgctgccaagttttttgttgttttttgtttatacaattcagtgactttgagtatatttacagagttgtgcagccatcaccaaaattaggttttagaaatttttaccactcggccgggcgcagtggctcaggcctgtaatctcagtactttgggaggccaaggcagatggatcacttgaagttgggagttcaagactagcctggccaacatggtaaaatcctgtctctactaataatacaaaaatacccaggcgtggtggtgcatgcctgtaatcccagctacttgggagactgaggcaggagaatcacttgaacttgggaggtggagtttcccatgagccgagattgcaccactgcattccagcctgggcaacagagtgagaccttgcatttttttttgagacggagtctcgctctgttgcccaggctggagtacagtggcgcgatctcggctcactgcaagctccgcctcccaggttcacgccattctcctgcctcagcctcccgagtagctgggactacaggtgcccgccaccacgcccggctaatgttttgtatttttagtagagacggggtttcaccgtgttagccaggatggtctcgatctcctgaccttgcaatccgcccgcctcagcctcctaaagtgctgggattacaggcgtgagccaccgcgcctggccgagactccatcttaaaaaaaaaaaaaggaaatttttatcaccctataaagaaattttggggctgggcatggtggcttacgcctgtaatcccagtactttgggaggccaaggcagatggagcgcatgagcctaggagtttgaaatcagcctgggcagcataacagcaccctgtctctgaaaaaaaaaaaaaaaaaaaaagaaaaaaaaagaaacagagttttggccaatttagttacttctgattctcaccctcagccccaggcaactaacctatttctcatctctatagatttggcttttctaggcccagtgtggctcatacctgtgatcccaacactttgggaggccgaggcaggaggatcacttgagactagcctgggcaacatagtgagacccgtgtctctacgaaaaatagaaaaaaattatccgtcttggtggtgtgcggctgtagtctcagctgcttggaaggctgaggttggaggatcgcttgagtctccaaggttgagtttgccgtgatcctgccactgcacttcaacctgcgcaacagaatgagaacctgtctctaaaaaaaaaaaaaaaaaaagctttttctggacattccatataaatggaatcatatagtgtatgaccttttatatttggtggctttcacttttttttttttttttttttttgagatggagtctcactctatcacctaggctggagtgcagtggtgtgatctctgctcactgcaacctctgcctcctgggttcaagtaattttcctgcctcaccctcctgagtagctgggaccacaggtgtgcgccaccacacctggctaatttttgtatttttagtagagatggggttttgccatgttagccaggctggtctcaaactcctgacctcaagtgatccgcctgccttggcctctcaaagtgctgggattacaggcgtgagccacagcataaagtttttgaagatcatttatgttgtaacatgtatcagtacttcatttctttttagggccaaatagttattctgttttatggctacagtgcattttgtttatccatttaccggttgatgttcatttgagttattcattcagatgttcaactgaattgtgaataaagcattttttgtttcttttttttttttttttggagatagggtctcactccgttgcccatgctgtagtgcagtggcgtgaaaaagctcgctgcagcttcaccctcctgggctgaagtaattcttctgcctcagtctctcatgtagctgggaccacaggcacgtgccaccattcccagctaattttttgatttgttgcagagatgggggtctcgtgattttgtcccggttggttttaaactcctggcctcaagcaattcttctgcctctgcctcccaaagtgttaggattataggcatgagccacctcctcgcctggcctgaataaaccttttagaaggctgggtgtgggggctcatgcctataatcctagcactgtgggaggctgaggcaggtggatcgctggagtccaggaattccagaccggcctgggcaacgtgatgaaacctgttctctacaaaaaatgagccgatgctgggcatggtggcctgtattcccagcactttgggaggccgagctgggtggatcatgaagtcaagagtttaagaccagtctggccaagatgctgaaaccccatctctactaaaaatacaaaaattagccgggcgtggtggcgggtgcctgtaatcccagctactcaggaggctgaggcaaagaattgcttgaacctgggaggcagaggttgcagtgacccgagatagcaccactgcactccagcctgggcaacagagtgagactctgtctcaaaaaaaaaaaagaaaaaaaaagagccgagcatggtgctatgcacttgtagtcccagctgttcgggaggctgaagtgggaggatcacctgagtccaggaggttgaggctgcagtgagccatgatcgcaccactgcactccagcctgggtgatagagtgacaccctgtctcaaaaagaaaaaaaagaaaaaaaagtttttatgaacattattgcccagatctttgtggagcatatacttttcatttcttttgagtagatacattggagtagatttgctgggtcatgcagtagtaagtctatgtttaattttttaagagacgaacttttccaacacggttgcaccattttacattctcactagcactgtatgagggttccagtttctctcatcctcccccaacttacttttcctctttatcatctattatcctagtgggtgtgaagtagtttctcagtgtggttttgatttgcatttccctaacaactaatgatgttgaacatctttccatttgcttattgttcatttgtatattttctttggagaaatacctattcagatcctagctcatttttcaaaaattgggtgtgtcatctttttctttatatattttatttatttattttagagatgagatctcactttagagttctgctgtcaaactcctggcctcaagcagtcttccaccttggcctcccaaagtgctgggattacaggcatgagccactgcgcctggcctatttatctttttattgttgagttggagtatttatttatttatttatttatttattttgagatggagtcttgttctgttgcccaggctggagtgcagtggcgtgatctcggctcactgcaacctccacctcccaggttcaagtgattctcctgcctcagcctcctgagtagctgggattacaggtgcgcaccaacacgtccggctaatttttgtatttttagtagagacagggtttcaccacgttggtcaggctggtctcgaactcctgacctcatgatccgccctccttggcctcccaaagtgttgggatttcaggcgtgagccactgcgcacagcccggagtaattctttatgtatcatttttgttttttgagacggagctgcctctattgcccaggctggagtgcagtggcgccatctctgctcactgcaacctctgcctcctgggttcaagcaattctcctgcctcagcctccctagtagctgggattacaggtgcccatcaccacgcccagctagtttttgtagttttagtagagattgggttttgccatgttggccaggctggtgtcgaattcctgtcctcaaattatcctcctgcctcggcctcccaaagtgctgggattataggcatgagccactgcacctggcattctgttttttttttttttttgaggtggagtctcgctctgttgcccaggctggagtgcagtggcgcgatctcagctcactgcaacctctgcctcccagtttcaatcaattctcctgcctcagcctcccgagtagctgggactacaggcactcgccaccatatccagctcatttttgtatttttagtagagatggggtttcactatgttggccaggctggtctcgaactcctgaccttgtgatctgtctgtctcagcctcacaaagtgctgggattacaggcctgagcgactgcgcctggctgcattccttgcatattcttattctgtggtttttattttcttttttgagacagggtctcagtctgtcacccaggcaggagtagcgcaattttggctcactgcagccttgacctcttggactcaaagcaatcctcctacctcatcctcctgagtagctgggactgcagatgtgcgccactatgcctggctaattttgtagagaccaagtttcaccatgttgcccaggctggtctcaaactcctgagctcaagtgatatgcccacctcagcctcccaaagtgttgggattacaagcattagccgctgtgctcagtctctttgagctttcttgatggtgttggtgtttttgacatgcaaaggttttacattttcagtaaatcgatttattgattttttaaattgtttgtgcttttggtaatgtatataagaaactattactttccccaggatcatgaagatttactccctcctatgcttcttttaagaattttattttgttgttaagttttgggaggatttttttttttttgagacggagttttgctcttgttgcccaggctggagggcaatgacacgctctcagctcactgcagcctccgcctcctggattcaagcaattctcctgcctcagcctcctgagtagctgggattacaggctcccgccacaatgcccggctaattttttatatttttagtagagacggggtttcaccacattggcctggctgattttgaactcctgacctcaggtcatccacccgcctcagcctcccaaagtgttgggattacaggtgtgagccactgcgcctggcccttgggaggaccttttttttattattatttttttgagacagaatcttgctctgttgcccaggctggagtggaactcccaggcttaggtgatcatcctgcctcagcctcctcgatagctgggactacaggcatacaacaccacactcagctcgagttttatagttttagctcctgtatttaggtctttgctccattttgagttaatttttgtgtatagtgtgaagtagcatatagatatccagttgtcctagcatcattatttgatttgtatgtggatatccagttgttccaacacatttattgaaagattgcctcttgcctaatgaatatttttggcagttttatcaaaaattagttgacaatataaatgtaagagtttatttctgggctcttaattctattctgttgatctatatgtctttctttatgccagtaccacactgccttgatggctgtagctttgtaacatgttttgaaattgggaagtgtcagtcctccacctttgttctttttcaagattgtatcagttattttgggtcccttgcctcccttccccttccccttccccttccctttcgacagagtctagctttgttgcccaggctggagtgtgcagtggcgcgatctcggctcactgcaacctctgcctcctgggttcaagccattcttctgcctcagccctgagtagctgggattacaagcatggatgaccactccagttaatttttgtatttttagtagagatggggtttcaccatattggccaggctggtcttgaactcctgacctcgagtaatccacctatcttggcctcctaaagtgctagaattacaggtgtgagccaccacacccggcctggctcctttgcatttctttctttctttacttttttttgtttgtttgttttgagatggagtctcgctctgtcacctgggctggagtgcaatggtgtgatctcgctcaccgcaacgtctgccttacgggttcaagcaattctcctgcctcaacttcccgagtagctgagattacaggcgccctccaccacgcctggctaatttttgtatttttagtagagatggggtttcgccatgttggccaggctggtttcaaactcctgacctcaggtgatccatgtgccttggcctccaaagtgctgggattacagacgtgagccgccttgcccggtcccttgcatttcttcttttttttttttgagacagagtctcactctgttgcccaggctggactgctgcagtggcgcgatcttggctcactgcaagctccgcctcacgggttcacgccattctcctgcctcagcctcccgagcagctgggactacaggcgcccaccaccacacctggctaattttttatatttttagtagaggcggtgtttcaccatgttagccaggatggtcttgatctcctgacctcgtgatctgcctgcctcggcctcccaaagtgctgggattacaggcatgagccaccgtgcctggtggtcccttgcatttctatatgaaatttaggatcagcttgtcaatttctgcaagaaaggaacctggggttttgataggattcagttgaatccgtgaccaatttggttagtattgccatcttaacaatgttaaatctctgatccataaacatggaatgcctttccatttatttaggtcgtctttaattttattcagcaatgttttattgttttcagtgtgtaagtcttacactttggttaatttttttttttttttgagacagggtctcactctgttgcccaggctggaatatagtggcacaatcactgccacattgtagccatgacctcctgcactcaagtgatcctgccacctcagcctcctaagtagctgggactacaggcatgtgccaccacactcagctaatttttaaaaatttttttgtggaggcaggatcttactgtgttggccaggctggtcttgaactccaagtaatcctcctgccttggactcccgaagttatttatgccactgtacgtgccataaatttttttctaagctacttcttagtgatggtattataaatggaattgttaccttcatttcattttgggattgttcattgctagtatatagaaggttatttaaattttgcactcatttattcaatggtcagaataaatgtgtggccagcatgacttccaactgtttgacagtgttgcttaattattttgtctcgatcagccgcattttacactagataccctggactagttgtgggtaccttaggcttagtttatagcattatgttactctgtgtattaaaagcacatcaaaatagcactgtgtgtaaatcatttgatttaagtcatattcagaatgtagtgcctttaatttcataatacacaaaatatacattttttttttttttgagatggagtctcactctgtcacttaggctggagtgcagtggcgagatctcggctcactgcaacctttgcctcccgtatccaagagattcttctgcctcagcctcccgagttgttgggattacaggcacccaccaccacgcctggctaatttttgtatttttgtatttttagtagagacggggtttcaccatgttggccaggatggtctcaaacttctgacctcaggtgatccacccgcctcggcctcccaaagtgctgggattacaggtatgagccactgcacccagccgaaaatatacattttcgaatagataaatgtacattttgaaggaaaattcacttggttttattttttgattagtcatgagtagcctctacagttaagttgtcatgtaaaaaaaatttttttttttttttttttttttgagacggagtctcgctctgtcgcccaggctggagtgcagtggcgcgatctcggctcactgcaagctccgcctcccgggttcacgccattctcctgcctcagcctcccgagtagctgggactacaggtgcccgctaccacgcccggctaattttttgtatttttagtagagacggggtttcaccgtgttagccaggatggtctcgatttcctgacctcgtgatccgcccgcctcggcctcccagagtgctgggattacaagcgtgagccaccgcgcccggccaaatttttttttttttttttttttttgagacagggtttcgctcttgttgcccagactggagtgcaatggcgcgatctcggctcactgccatctctgccttccaggttcaagtgattctcctgcctcatcctcccgagtagctggcattgcaggcatgggccaccacggccgactaattttgtatttttttagtagagatggggtttctccatattggtaaggctggtctcgaacccccaacttcaggtgatctgcccgcctcggcctcccaaactgctgggaccacaggcatgagccaccgcacgtggctttttttttttttttttttttttttttttttttttttttttttttttttttttttttttgagatggagtcttgctctgttgcccaggctagagtgcagtggcgtgatctcggctcaccgcaacttctgccttctgggttcaagcaattctcctgcctcagcctcttgagtagctggaactacaggcatgcgacaccgcacccgtctaatttttgtatttttattagagactggatttcatcgtattggccaggccggtctcgaactcctgacctcgtgatctgcccgcatcggcctcccaaagtgctgggattacaggtgtgagccaccatgcccagcctgtcatataaaattaaaagcaaaagctggggccgggtgtgatggctcacgcctgtaatcccagcactttgagaagccgaggagggcggatcacctgaggtcaggagttcgagaccagcctggccaacatgatgaaaccccatctctactaaaaatgcaaaaattagggccgggagtgttgactcacgcctgtaatcccagcactttgggaggctgaggtgggcagatcacaaggtcaggagatcaagaccatcctggctaatatgtgaaaccccatctctactaaaaatataaaaaattagccaggcatggtggcaggcacctgtaatcccagctactcggaaggctgaggcaggggaatcacttgaacctgggaggtggaggttgcagtgagccgagatggcgccactgcactccagcctgggcaacagagcaagactccatctcaaaaaatatatatatatacacaaaaattagccaagcatggtggtacatgcctatactcccagctactcaggaggctgaggtaggagaaacactggaacctgggaggcggaggttgcagtgagctgagatggcaccgctgcactccagtctgggtgacagagtgagactccatctcaaaaaagaaaaaaaaaaaaaaaacccgggtgcctatagtcccagctacttggaacgctgaggcagaagaatcacttgaggagtttaaggctctggtatgctatgatcataccccttcatagctattgactgcattccagtctgggcaacatagaaagacctcatctctatttgtaaaataatttagagtgaaattcccatagtgttgtttgtgtactgtgttttgttcattaccatatttgcctgttgttgaagtataagagaattgttaggctggtttatttcattcattctctttcagttatgagacaaagaattaaacctttaaattttatgtttattagattatttctgaaacttttaacatatttttcagggtcagttaaatgaaagcatggaccatgggggagttggaccatatgaactgtaagtttatatgaagagattttcattgtgttgtctttcttacaagtaggttttatcagttctatttcgtagcaatcatgtgattcctgtaacctgttcttaaatatgtagtcatatttatcaactcgatgtattgaatttggcaccaaaatctgatcaatataacctatcagagttttgagattatgtatggattttgaggaaaagatattaattcagattcagagtactaaatatgaatctgagttgttagtttaaagagccacagttttaatcttttcttacagaaaaatttgtagaaatgcctcaaaaagtcaaatgctttctgttttgcttaaatatacaaacagaaattcatacagtcattcaaacagaaattcatgcaatccggctgggcacagtggctcacacctgtaatcccagcagtttgggaggccaaggtgggcgggtcatttgagatcaggagttcgagaccagcctggccgacatggcgaaaccccgtctcttcttaaaattcaaaaattagccgggcgacatagcgagactccgtctcaacagcaacaacaaaaaagaaattcatgtaatcttaagtcattttagacaagctccattaggtgagtatggtgattaatctgctctgtattgtactctcaagtaaaaagcattagtgtaggaggagaatgagaagatagatcactcatgtagaaagcatttaaatgacagagacaattgctaccccttttggattctttatttttatttttttggagatggagtctccctctgtcacccaggctggagtgcagtggcacaatctcggctcaccacaacctccacctcctgggttcaagcgattgtcctgcctcagcctcccaagtagctgggactacaggagcgcaccaccacacctggctaatttttgttgggttttttttttttttttttttttttgagacaaagtctcgctcttgttcccaggctggagtgtgatggcatgatctcggcccactgcaacctctgcctcccaggttcaagtgattctcctgcctcagcctcctgagtagctgggattataggttcctgccaccacgcccagctaatttttgtatttttaatagagacggggtttcaccatgttggctaggctggaatttttgtatttttagtggagacagggttttaccatgttggccaggctggtcttgaactctcgacctcaagtgatccgcccacctcagcctcccaaagtgctgggattacaggcatgagccaccacgcccattggattctttaaatcaagctaataacttgaaaaaacagatacagagaagaagttttgtactatgatgtgaactaattgggtagttttggaaagatccctgattttctgctgacattgccaaatgaggttggataatacctaatttcatagatattttcaatgaagtaaatttgaataactgcaagactttttttctttgtcaacttaatgaactttttctaacttaccttagctttggggtgcttgatgcttatgaaaataaataattgtcttcttttactttgttgcactcctaagagcaagatgggtcaccagcagctgtattggagtcacccatgaaaattcaatcagggttcttgctcttgttgtgtctgctcaaactggcaaggtctgatccagaaatacggcctcaatatgtgcgccagtgtttctatcagtaaacgaaggatatagatttcattaagttggactaagtgatcttacttgaatggattatccaaggcatctacccaatgaaaaaccatagtacccctttatgcataaaataaacaattataaaaataagtaaataattgattgcccattctatgaacaaggaggcaaacgattatcaggccaccctcctcttgacctgctgttctgtttgtttagagcacaaataatttggtgtcatgtacttttttacttttacttacttagattacatttctctgtctcctttttcttgactatatgctgaaagtaatttaactttttgcaaatttatttttggttttgcttttcttcccagtggcatggaacattgtgagaaatttgaaatctcagaaactagtgtgaacagagggccagaaaaaatcagaccagaatgttttgagctacttcgggtacttggtaaagggggctatggaaaggtaggcaatatttttgaaatgagagctgttgtctgtcttgaatagattgatttttatgccctggttccagcagtcatcttcagtctttgtcagctatcagcaaaggatgtgatcatgaccacttagctggtatgtttgagggatgtacagaagttcagttttcccttcttttcataccaccacacatgtaaaagcctggcacataataggtactcagtcaaggttcatagaatacataaatagacaactgtaccaggcaaagtctattattaaagggttcattctttactttggttaaatggtatcctctttaaaaataaagccctccttgcttacaagagacatggcagtctgagttgttatctgttactgagaccttaatctcaactggttttctggagcaatagaattggggaagctgaaggaatataaaaagggggaagaaaactatttagtttcacagttttgcccaaggctttacaacttaagacgtcacttttatgagttctgcccacaaaactttttaccaaactattctcttatcaaaataatttagataataacttggttagtattaagttttaagaattatttttgctattgtgtagtgttaatttttgcaaagcagacatttgtagcctattcttatgcttaagaacacattgtaatttctaatcatcctgaatgtgcaacacatgcactttgaatctcacatgttttaggtgttgcatgaaaatgtttatagttgtctttcagtatgggggaggggtaagggagaactgattccaagacctttgcagataacaaaatctgccgacgctcaagtgccttatataaaatggcatagtatttgcatataagctacacacatcctcccatatgcttaattttttattttattttttatgatttttgagacagagtctcgttctttcccgcaggctggagtgcagtggcacgatctcagctcactgcaacctctgccttccagattcaagcgattctcctgcctcagtctcccgagtagctgggattacaggtgtgcgccaccacatccggctaatttttgtatttttagtagagatggggtttcaccatgttggccaggctggtcttgaactcctgacctcaggtgatccacccgagttggcctcccaaagtgccgggtttacagttgtgagccacctcacctggccatatttgtgttattttttattgtttgtattgtttattgttttttcccccaaatattttcattctgcggttggttgaatccacggctgctgaacctgtagattcagagggccaagtattagtacaaactattttaagtaataggtaaacagtaatttcctgccaactatttttaaatagttttatgtgaagcaagggcagtggcaagcaaccttgaaagaaatttatgaaatattttataatttttactgccaactatttttaaatagttttatgtgaagcaagggcagtggcaagcaaccttgaaagaaatttatgaaatattttataatttttaaggtggtattatgcctctgggaacactgtttatagcttgttctaagtaggattttatatattaatataaagtaacagtgtttattattagatggtcattgtccaacattaccaccagatggcagcagaacaaacaggaaagtcatgatcattaatgtggtctgttcttttagctgatcatttttgcacatagtttttataatataaactgctgtggcatatgtttcttataactaggaattaagggagtatgcctgacatagtttgcctttgaataacacacacttttttttaatccaggtttttcaagtacgaaaagtaacaggagcaaatactgggaaaatatttgccatgaaggtgcttaaaaaggtgatttccactccccctttttagtcctcacacaccatatttttacacttgatctcagccaaaaggctgggaagcaatcatatcatatttttaattgttgtaacattttggcctaaaatttgcagtcaaaaaaatgtatctcaagccaggtacagtggtgcacacctgtggtcccagctacttgggagactgagtcaggaggattgcttgaacttaggagttcaagggtagcctgagcaatgtagtaagacccagtctcttacagaaaaaatgtatttattttcttttcttttttttttttttgagacgtagtcgcgctctgtcgcccaggctggagtgcggtggtgcgatgtcggctcactgcaacctccacctcccgggttcaggtaattctcctgcctcagcctcccgagtagctgggactacaggtgcatgctgccacgcccagctacttttttgtatttttgatagaaacggggtttcaccatattggccaggatggtcttgatctcctgacctcagtgatccacctgcctcggcatcccaaagtgcagggattacaggcatgagccaccgcacccggcaaaaaatgtatttctaacacagttgcaatactttttagaatgtgaggtatgtttcattactgttattcctatttttatttctgcttggtgagtgtggaaaagagagctcttgcaattctttgctgaggtaactcttcactgtttctgatctccttatttctaagtaataagcatgtactgccatctctttttttttgagatgaactctcactctgttgtccaggctggagtgcagttgtacaatctcagctcactgcaacctctgtctcccaggttcaagtgattctcctgccctagcctccctaatagctgggattacaggcgcctaccaccacgcctggctaatttttggatttttagtgtagacggggtttcaccatattggccaggctggtctcgaactcctgacctcaggtgatccatctgcctcggcctcccaaactgctgggattacaggcacgagccactgcgcctggcctactgctatcttttttttttttttttttttttttattgtgacagagttttgctcttgttgcccaggctggagtgcagtggagtgatctcggctcaccacaacctccgcctcccaggttcaagtgattctcctgcctcagcctccctagtagctgggattacaggcatgtgccaccacgcccggctaattttgtatttttagtagagatggggtttctccatgttggttaggctggtctcgaactcaggtgatctgcccgccttggcctcccaaagtgctgggattacaggcatgagccaccatgcccagccaactgctatctttttaattcagcagttttcaatttttttttttagacggagcctcactctgttgcccaggctggagtgcagtggcgtgatctcagctcactgcaacctccacctcccaggttaaagcgattcctctgcttcagcttcctgagtgtctgggattacaggcgcccaccaccacacccggctaatttttgtatttttagtagagatgcggtttcgccatattggcatgctggtgtcgaactcctgacctcgggggatcggcccgccttgacctcccaaagtgttgggattacaggcgtgagccaccgagcctggcagtattaactttcttttatgcgagttaaggatttgtttcttgtttacttcaccctcctttatcctcatcctctcattttgttttgctttctttgaatctactattgtcctctgatgtcttccaacaactttgtaaaacacctttcagtctaatgttctttgatcaggcttataagataatctatcagttccatttatttcccagaggcatatcttaggaactttctatccacctgttcccatctggagtggtagctctttagtcacaactgttatgactggactctttcttcaccacaaccctggaatcctcttggctccttcagtgttggatcttttgtttcctggatcccatatcttcattttttccctttttcttagtttatgtccttgttttggtgacactatactagtggctccctcagacaaggtatataaagatacatttataataaaaatatatccatattgcatatttgagaatttctttacatttttatttacttgattgtttatgttattggagttgaaaattattttcacttagaattttgctcagttttcttctattcttgagagtttctgttgaagtgctttggcattctgattcccagtcgtttacacatggcctattttttctgtggaaatatttaagattttctctttatttctgatctaagtttttatagtgatgtgtgttgctttgactttgattattatttttatttagttagtttttgagatagggtctcgccctgtcacctagacaggagtgcggtgacacaattatagctcagtgcaacctcaaattcctgggctcaagctatcctcccacctcagtctcctgagtagctgggaccacagacacgcaccaccaggcctggctaataaaaaaaaatgtagagatgggcactcaccatgttgcccaggctggtgttgaactcctgggctcaagtgatccacccgcctcggccacccaaagtgctgggattggattacaggtatggcccactgcgcccggcctatttaattaaattaattaatttatttatttttaagagacagggtctcactctgtttcccaggctggagtgtggtggtgtgatcatacttcactgtaacctgtaactcctgggctcaagcgatcctcctgccacaacttctgagtagctaggactgcagatgcatgccaccacgcccagttcatttttaaaatgtttcgtagagacaaggtcttcctgtgtttccccggctggcctggaactcctggcctcaagcagttgttctgttttggctcccaaagtgttgggattacaggcatgtgccactgtgcccagcctatttttattcttttaatcttaaagctttagtctttcagttctaggaaattttcttatgtgatttatttggtaatttccttcccactgttttctcttcttggaattgcaattagttggatgttggatctcctggaccgatcatctaatttttcttatcttttccacgtttccatttctttgtcttgtttactttcttctactcaatttttttttgagatggagttttgctcttgttgcccaggctggagtgcaatggcgcaatcttggctcaccgcaacctccgcctcctgggttcaagcgattcccctgcctcagcctcccgagtagctgggattacaggcatgtgccaccatgcccggctaattttgtatttttagaagagacagggttcctccatgttggtcaggctggtttcgaactcctgacttaggtgatccgcccgccttggcctcctgaagtgctgggattacaggcgtaagccactgtgcccagccatttgactaaatttttttttaaagctgttgtatttgtgattctccagaattctttctgttgtttttgttttatagcaacctgtttaatgagtataatatcttctcttacccctctgagagttttatttttttttaatgtttattattatttttttgagacaagagtctcactctgtcgtgcaggtttgagtgcagtggtgcgatcttggctcactgcaacccctgcctcctgcgttcaagcgattctcctgcctcagcctcctgagtagctgggattacaggtgcccgctaccacacctggctaatttttgtatttttagcagatatcgggtttcatcatgttggccagactggtcttgaactcctgacctcaggcaaaacgtccacctcggcatcccaaagtgctgggattacaggtgtgagccaccacgcccagcctctctgagagtttaattataattatttgaaatgttcttttgttttacgcatgttcttttttgactttctgttttctttgactttgatttagtcagttttagtcactttgttccatgttagaggccttctttagatgtctggtgtcattcactgattattcttttttttttttttttttttgagttggagtcttgctctgtcgtctaggctggagtgcagtggcacagtctcggctcactgcaatttccacctcctgggttcaagcgattcttgtgcctcagccacccaagtagctgggataacaggcatgtgccaccctgcctggctaatttttgcatttttagtagtgacagggtttcgccatgttgtcagcctgatctcgaactcctgacctcaagtgatctgtccacctaggcctcaataacccatccactgcgcctggcctgattattcatatttaagagtagaactctgaaaagctgatcagaagttctgtgtgtgtaagcttctctgcagggtagtcaagtggttagctggcacttgatcaacaacttcaaataatagtgtctgtagggctgggtgtggtggctcacgcctgtaatcccagcactttcggaggctgaggcaggttgatcacctgaggtcaggagttcaaaaccagcctggccagctggtttgggggcgctgaggcaggagaatcgcttgagcctgggaggtggaggttgcagtgagccaagattgcaccattgtgctctagcttggacaacaagagcgagactccatctcaaataaataaataagtaaatattgtctgtagatctttttttttctggggaggatcagttggtgctaagaaagttctgccattcatttgcctggaaaaagcattctggagctgagtgagagaagatggagatcttacctctcaacacgcggactttcactaaactcgagtttttacattagtactttactctgtggatctaatctttcactttttttttttgtcccggggaatttaactctcctagggttagttcttcgacttagtatggagatgggagcctttttggtctgtctgttccttacacagacttgtagatgatctccctgtttttagcactccaccttctgccttctacagtcttcagttcctttaattttttcccttccttctaatttttcctctaatgtttgaaccttgctggggttctatagatagattcaacttcttttgtgtattcccctttgcaggcacttaggtttgatcttaccccactctgctacatcatggaccattgctttatccccactctgtcttttcaggtgtgggattccacatgtcttctagttttactgatggattatgtgtgtgtttgttttcttattcttgtttgggattgattactgaaaagattccactgtcttttttttttttcctgggttcaagtgattcttctgcctcaacctcctgagtagctgggattacaggtgcccgccaccacacccagctaatttttgtatttttagtagagacagggctttgccatgttggccaggctggtctcgaactcctgaccgcaggtgatccacccttcttggcctcccaaagtgctaggattacaggcatgagtcactgcgcccggcctccactgtcttaaaacaaaagttccagtggagaactactttaaagacaatcaaagtgactttttaaaaaaattataagacttgtaaaactttggtccttcttgctgatttttatttaagcagtataaatgactcctcagtttgaaagctgaggaacaaatactgtgaccacaattttattggtaattgtctttaaaaagccatctagctattcttcacatcagtttcttcttcagtgggttgacattgatatcagctatttgactttcctgttggaattgttttagattaatgattttttaatctgtaaaacatgttaggtatagaattgaaggcagcataatagtgcttgtcccagaaatgtgaaaagaagtactggtcaagatttcttcttttatttgaaacagagtctcactacatcacccaggctggagtgcagtggagcgttctcagctcactgcaacctttgcctcttgggttccagtgattctagggcctcagcctcccaaatagctgggactacaggtgtgtaccaccacgcctggctaatttttgtacttttggtagagacagggtttcaccatgttggccaggctggtctcaaactcctgacctcaagtgaccgcccacctcagccccctaaagtgctggaattatgggcgtgagccactgcgcccagcctctggtcaagattcttaactgattcattccttgtgatgtgttatttatgtcggataatcaggcctgaccatattaggcataattagatcttgggtgaagtatgtttttggcacaggtatctagtgaaaaaaagagtgcttgttttttttccccactcatggtgggtggggtggtatattgggaaatccatagacttaattactgctaagtgtcaggcctcattctggggcccagggatccaggacctaagctgtttgcctctgcttttgcttggttgccattgtttcccattcttggggttcttttcttaatcctggctagaggatctgatactgtctccttccttgtccttgaaagcaagctcatagcaaaaataatgaaaataaagatgtcattagggttaagttcagggctttcatttctaaatccccaagtaagatgactataggctccctttgagttccttccttctgattttaattatcctggaggcagagtactaacccctctgacctgagtgtgtggtaagtgtatacctcttcccccagactttaagatgaaatcagagtagaaccaggtatccccttaagtgagttgtttcaatctggacattctgtctggatttattagttctcctgggactgtttacttcttataggaatggtaccattcaggtatttgcttagagtggaatagtgaggaaaagactatcaacagccatcacccgaccctaccagttgcagcaaaaatataccatggaagcaaaatactattgcctacggcattagttcacctcccactgtacattttagaacctttggccaaaggtgttctccacctctgaaatattgcggtttcatagaacaataactttctcacttttgacttacttgattcctacaatgcctgttttttggccctaagccctttagttaataaattttagttaataaattttcctcatgtacaatttgagagttaactgcagatttcatagcacttcacccctaatttcatctatacatctcctaagaataagggcattttttttttttttttttgagaagcagtctcactctgttgcccaggctggagtgcagtggtgcaattttggctcactgcaacctccacctcctgggttcaagcgattctcctgcctcagccccacaagtagctgggattacaggtgcctcctaccacgcctgcctaatttttgtaattgtagtagagacgaggtttcaccatgttggccaggctggtctcaaactcctgacctcaggtgagccgctctcctcggcctcccaaagtgttgagattacagacttgagcctccgttcccggcctctttttccttttgtagttaacaagtgatctgtggaatgatagaaacggtgtgaatattctgtcctataataatctttacttaatggttttatctggattgtttcttgcccaaatattactgtactgtagtgattataaaatggagacttttctattttttctgtattttttctatattgtcattagtctgtaaagatttttttatactcctttttttttttttttttttttttttgagatgaagtcaggctggagtgcagtggtgtgatctcagctcactgcagcttctgcctcccgggttcaaactatcctcctgcctcagcctccagagtagctgagactacaggcgtgcgccatcgcgcccagctaattttttgtatttttagtagagatggggtttcaccatgttggccaggatggtctcgatctcttgaccccgtgatctagccaccttggcctcccaaagtgccaggattacagacgtgagccactgcgcctggccctatactctcttttaaaaaaatttgtttgttttttttttttgagatggaggttcactctggtgcccaggctggagtgcaacgatgtggtcttggctcactgcaacctccatctcccaggttcgagcaattctcctgcctcagcctcctgagtcgctgggataggtgcgtgccaccatacccagctgatttttgtatttttagtagagatggggtttcactatgttggccaggctggtcttgaactcctgacctcatgatctgcccgcctcagcctcccaaagtgctgggatgacaggcatgagccaccgcacctggtctttttttttttttgtgagacaggttcttcctctgttgcccaggcttgagtgcagtggcatgatcatggctcaccacacccttggacaccaggctgcctcagctcactgcaacctctgcctcccaggttccagtcattctcgtgcctcagcctctggagtaacgggagtataggtgtgtactatcacacgtggctaattcttgtatttttagtagagatgaggtttctccatgtggggcaggctggtctcaaactcctggccaacatggtgatccgcctgcctcggtttcccaaagtgcttcatattgttagccctaattctagtccaattccatagcgttcttttttatttttatttttttatttttgagatggagtctcgctttgtcccccaggctggaatgcagtggtgtgatctcggctcactgcagcctccacctcctgcgttcaagcagttttctgcctccgcctcctgagtagctgggattacaggtgcctgccaccacgcccggctaatttttgtatttttagtagagacggggtttcatcatcttggccaggctggtcttgaactcctgaccttgtgatctacctgcctcggcctcccaaagtgctggaattacaggtgttagccaccgtgcccgaccacattcttctttcagttcatatttggatatcctttttttctacagtgagaagaactctggtaacaacataaacgcactcatttgttcagttgtacaatatgtgcataatgaaaattgtaataccaatagtatttccagctacaaacctactaagtttgatttaatatttctttgcaattttttgtgtgcttacatataggccactaagggtgtgcagtctaaaattacttaaatatctttttctcgctgggtgcagtggctcacacctgtaatcccagcactttgggaggccaaggcgggcggatcatgagctcagttcgaaaccagcctggccagcatggtgaaaccccatctctactaaaaatacaaaaattagccaggtgtggtggcaggtgcctgtagtcccagctacttgggaggctgaggcaggagaatcacttgaacctgggaggcggaggttgcagtgagctgagaccatgccactgcactccagcctgggtgacagagtgagactctgtctagaaaaaaaaaatctttttctcctatatcttttttctctttctctttctgtggtaaagttattggtgtaatagtcaattaaatttgtgtattcctattgtattcagttgtacttcctacccctcatccttgttgattttattttatttttggaactcattaaacattaatatggttcaaaaagaaaaatctacattttataattacagtaatatttgatttagggaagaaaaaaatggatgataaaaccattggggttttactcagaaggtattctcaaaagtcttatttcttttccttcccttccattatcattagcttttagtttatcttagttgtcttcatttttgcaggcataagcagatacatattatatatattctcatttcccctttcttgtacaaaagatagcatagtatccatgctgctgtacttttaagtactcttttgtatcttgtttttatagaaatttttcttatttttattttatttatttatttatttatttatttatttttttgagacggagtctcactttgtcacccaggctggagtgcagtggcgtgatctcggctcactgcaagctccgcctcccaggttcatgccattctcccgcctcagcctcccaagtagcttggactacaggcacctgccaccatgcccgactaatttttttttgtatttttagtagagatggcgtttcaccgtgttagccaggatggtcttgatctcctaacctcattatccgccctcctcggcctcccaaagtgctgggattacaggcgtgagccactgcgcccggctgatttttcttatttttatagctttgttacatgttgtgtagattccataggttttgggccaatatcctatgtctgagcatttaggctgtttctagtgttccactttcacagataatgttgcaaccaattacctgtgtatttgctttccatattacttatggagatgtaccatcagggtaacttcctggaacttatacctggcatgtctaaaacagggcatcattttcccaaaactttttcactttcttttgccaatattgaatggcaccattatctgtcctattacttatgcagaaataaaggtatcatcatttcttctcataactagtttgtcagcaaatgcaaattatgtattagcctttcatttttttctatcttcattttcttatagatcttcttagttggtttattatactagcctcctaactagtctcatttctttcctaatactccctactgctactagatgtgtctttcataaagccaaaggtgtgttcatttcacccagaccttcctttgcccagacgttccatttcctggcctttgcctacttctctagcctaatctctaaccacttctaaccataccaaactacttgtagatttcccagacgtattctgtcctcttttgcactggaatgccttttttttaccttctacatttctttctttcttttttgtcttttttttaccctttttgtggagaatggggtcacgcttgttaccaggcagatctcgaactcctgggctcaagcgatcctcctgcctctgcccacctaagtgctgggattacagacatgagccaccacgtccaggccacatttcattttaataactttcaagcgagactttctgctaggtcagatgtggttcccctgtttacccttaccatcctgcacttgcctacattgacttgtctttttttccctgagactttgggctcctgtcgacttttagactcctatggacagggcattccttctattctgctttcttggcacagcctggaggatggtagacactcaatagtttgtgaatatatgaataaacttgatctgattacagatttcttttttaaaaagtctctttaggtaattcacttacgtgttcactgcaaaaaatccaaactgcacagaggcatatataaagtgaatgttttccattaccccatctcagtttctagtgggaactatggttaatagttcaatattggcaggaaaaacacaaaatagattttagaataaaatagattatagaataaaaatgttcactattttgttcttatagatgatctcttttcctttaggcaatgatagtaagaaatgctaaagatacagctcatacaaaagcagaacggaatattctggaggaagtaaagcatcccttcatcgtggatttaatttatgcctttcagactggtggaaaactctacctcatccttgagtatctcagtggtcagtacacagagtttggtgtaattatttgcatttgctccagaaactgggtcaaaatgttatttttcaatggaagaatactttttcccattatgatcaaatagtgcttaaaattgatgagtacactgaagtacaaaattcagatgtgaccaaatgtttctattggcagacaaatatggaggaaactaaagatttttttccctcatctgtaaaattttattttaattcctttgtaatcactcacttaacagaaaaacgaatacctaagtgatgcagagccatcaaattgtagtggggtaagatactgtaatttaaataattgggaagattatttaacatactgactatttttggaattgggtctttaaacaagagtttttagtttaatgtagccttagtgatggggtatgtagcttataatggaaatcatccatatttgccagggcctaccacctcgtaggaacttgttgattccatatcatttctagatcacaggtgtctatttatttttttttttgagatggagtttcacactggtcgcacaggctgtagtgcaatggtgtgatcttgggtcactgcaacctctgcctcctggagttcaagcgattctcctgcctcagcctcccgagtagctgggattacaggcatgtgccaccacgcctggctaatttttgtatttttagtaaagatggggtttcaccatgttggtcaggctggtctcgaactcccgacttcaggtgatccacctaactcggcctcccaaaatgctgggattacaggtgtcagccactgcacccggccacaagtatctatttctagcaaacacagttcagttctctgagaaggattttgcagtaacgtgtaacatggaacagaaagctacagaatgtagcaactgttttgtgactattgccattggaaaaactttttttttttttttgaagatggagtttcgctcttctctcccaggctggagtgcagaggcgtgatatcggctcactgcaacttccgcctcccaggttcaagcgattgtcctgcctcagcctcctaattagctgggactacaggcatgcgccaccacacttggcttttttttgtatttttagtagagctgggctttcaccatgttggccaggctggtcttgaactcctgacctcaggtgatctgcccaccttggcctcccaaagtgctgggattacaagtgtgagccactgtgcccgcccggaaaaactttattttgacataatttcatacttaacacaaaaagttttaagagtagtataaagaattcctatgccaggctcagtggctcatgcctgtaatcccagcactttgggaggccaaggtgggcggatcatgaggtcaggagtttgagaccagtctggccaacatagtgaaaccctgtctctactaaaaatagaaaaattagctgggtatggtggtgtgctcctgtaatcccagctactcgggaggctgaggcaggagaatcgcttgaacctgggagacggaggttgtggtgagctgagatcgcgccagtacactgcaacctgggcaacagagcaagactcagtctcacacacacacacacacaaaataaaagaattcctatatatttctcacctagattccccagatgttaccatttcaccacatttattttgttttatcctatgtatatgtatatatgtgtatacatatatacatgcatgcatacataattgttttgaactgtttaagagagtgttacagacatgatttccctttacccctaaaatttcagtgtatgttttctttcttttcttttcttttttttttgagatggagtctcactctgtcgcccagactggagtgcagtggtgcaatcttgggctcactacaacctctgcctctcgagtagctgggattacaggcacccaccaccacgcccagctaatttttgtatttttagtagaaatggggtttcaccatgttggccaggctggtctcgaattcctgacctcaggtgatccgcccaccttggcctcccaaagtgctgggattacaggtgtgagccattgcacccagcctattcagtgtatattttctaaaatcaaggacagtatcttacataactatactaaaatgatcagaaataggaaattaacattgatgcaattataactcttcttagtttcctttaatctggaacatttcctcagtctttctttgactttcataatgttgacatttttgattaggacaggccagttagtttgtagaatgctttgggtttagctgatgtttccttagtattagattcaggttatgcaattttggcaggaccattgaagtgacattgtgtcctccttaatgcatcagatcaagaggtacatgatatttatatctttgtcccattacttgtgatgttaactttggtcacatgtataaggtggtgtctgctgattttttccatggtgacgtttttgtctttgtaattaataagtatcttttgaggagatactttgagattatttaaatatctttcatcaagctctcatgttcagttttgttgttttttttttttttgagacggaatctcactctgttgcccgggctggagtgcagtggcacgatctcagctcactgcaacctccacctcccaggttcaagtgattttcctgcctcagcctcccaggtagctgggattacaggcatgcaccaccacacccagctaatttttttatttttaatagagatcacccctgacctcaggtgatctgtccgcctcggcctcccaaagtgtagggattacaggcgtaagccactgcgcccagcccacattcagttttgacatccattgaatcttgcctgcaacaattaattgtgatgtttgccaagtactttttcttattccgtcacgtcttcttcatttattacttgggattctactgtaataaagaactttctcttcttccccctttaaaacatttatgtattcatttatttatgtcattgtggacttagggatcctaatatcattcaatgtgatataaccttttattatcattatttattttgatactcaaattgtgccatgttttttactaggccagtgccaggtttattctgtttatttaagggttctgaaaatacgaaatatgagcattcactaaaattagtgagggtgatttaattgtagactatcatttttctacctatgggtaaaatgttaaagagtctttaatcaatatatatattttttaacctcaggtctggaatctacagatattttaaagtttgtagatataaaacctggaattccaagccagttctagtttttaaatatatgtgtgtcacagaagaataagaatgctactaaaaatagaatcctgaggacttagttttaaaacctataatttttaggatctgtttttcatttttaaggggctgatgtcttttaattatggttagaaggaaagcacaaactctctcattagaagtgggttggaaataaatattgttttatttataatgttttttctttttctttacaggaggagaactatttatgcagttagaaagagagggaatatttatggaagacactgcctggtaagtgaactttttgtggttgcatagattcaggtaattacaagcaaagccccattcccactatgggcagccacatgattcagtaaattgagctggagccagtcactcactcaggacctcaagggggagaagcagttttgggactgggcagctatggaggtcacatcattcctttgcccttaggcttgagtggaacgctcttcacaccagttgttcctaacagaaccattctcattgcggctttctttccttgaattggtaagctgcctgccttggctgtgggtgagtgtggtttcccagtgaacctttatgtgtggaacaatggaaattatcagaaatcatccctttttttttaggctttctatttctcaaggtacagtcttagggaggtgataaacctgggcatatcatctgtagattgattatgtagtcagggtgggatttaccctcctatttctaaacatgtcatctgcttcaaattaaaaatatgcacatccttttgtgaagcaacaatattgggtcacaataaatcagtttatcctacacattaatttaatagaaaacaacacttaaatgtttttttctaccttgattaccaaaactgcattccattgtttaatttcaggccttttctaacaaagaagctgcatttaagagccttagggatgaagtgcccttttttggaggaggctcactgagccgtgttggaggctgtgtttgtggtcgtgctggctgtgaaactgcctcagtcctctaggacacaccctctccatcctggagtaatctgcaggattgcaacattgttatgcagccagtattgcagtgccttgtgcttttcgaatccagacagggttgattcagccctttattcttttgaggtagataaatttgggtgtcacacagtttatagttgtgggctggctggcaggtgggagggcagatactgtgggcctcagctgtctataaatatgtagctgtattaagtaagggatgagtgggcttctaagggtcaggttataagataccttttgaaatcaagatgtgatctctgagaataacaaagttcctatttcctatgggattttaaagttgggtgtggatgggagaaatttgcttgaaatgaatggctattagcttaattcctacacagacagaacaaaacatgaccaatggcagtttagcatattctggacatctttgcaattttagcaatatattctaatggcaaaataaagcactttatagtttcactaaaatgagtgaaacataaatgtccccatgccttttggcagcatcctatgccatctctttttccaatacatccccctaccccactaatttggtctttggtgcatgtctgtttctttcaaggaattttgctccatacgtaaactgctttggatagattacactctttttaattttattaaatcacttttgtttccagcttttacttggcagaaatctccatggctttggggcatttacatcaaaaggggatcatctacagagacctgaagccggagaatatcatgcttaatcaccaaggtggagacataccgtaaacaattctatagtaaataatcatcttaaaatcctcccacataggtcgtggccattttcaaagccccaaattcatctctctattttgtatatttcctccctcagaattcatggcatcatagtacttgctgatattttaagtctttaggtaattacgcttggtgagagtaaaagaagttgaggataatagtcgctcaactgccttttttagtttaatccttactctttatagtttttcatgtttttggaatctttacatcaaatgttgtataatgttttagactgtaaaagccagtctaaacattaattttggcttgttacttaaattgaaaagtgaatctcaattatataagttgagttttaataatgaaaatatgtaaatattggctgggcacagtggctgacacctgtaatcccagcactttgggaggctaaggtgggtggatcacctgaggtcaggagttcaagacgcctggccaacatggtgaaaccccatctctacaaaaatacaaaaaaaaaaaaaaattagctgggcatgatggtgggtgcctgtaatcccagctactcaggaggctgaggtgggagaatcgcctgaacccaggaggcgaaagttgcagtgagccaagatcgcgacattatactccagcctgagtgaaaagagcgagactccgtctcaaaaaaaaagaaaatatgtgaatattagaagctatgcttcttacagtaggttttattaatgctgggaaaaggattgaaattgaaccaaagtatttgataaaactttggaaatatgatgtttagtaggcatcaggttacttttttttttttttttttgagatgggggtctcactctgtcatccaggctagagtatggtggcatgattacagctcactgcaacctccgcctcccaggctcaagtgatccttccaccccggcccctcaagtagctggggccactgtggcacaccaccacgcctgactaatttttggtattttttgtagaaatggggtttcatcatgttgcccagggtggtctcaaactcctgagctcaattgatctgcctgccttggcctcccaaattgctgggattacaggcataacccaccttccccccagccagaatcagtttattcttgctgtttgtttgtaacaacaaacataaacatcagagagactgataatctatacaactatagatatagcacagtgagccttgactacaactgcatgctgctaaagacagctcaatttatgctaatctgggctgtaggtagacttggcaattcactcgtaccccaaaggagcaaccagctgacccagggtatctagaaggtggtagcagctgctaatccttagatgtctacagaataatccatgaggtagttaattgtttcaaactcttagaaaatgatgtatgaacaactgaggctcatataaacattccagattatactcctccacccaccttttttttttttttaaggagaaatgatatacttaactgaatatatcatgggaatcagtgtctcttccttcctctcatcaacacctcctcactccccaaaacgtggattctgatctgaattataagtcacaggatagaataggggagcgatagaatagttaacttctttgatttataaggttgagtgtatcagatggttctgtgaaaataaaggccatacttcttctgtatcagagtgtagtatatatttacatttgaatcaataggtcattgtgccttttctgtgaaatgaacctcaaatactagagtccctgagattgttgaaccacttgttatgacagtccagtaaagaaagctaaacttgaactgaaatgatctttgtgtaaggtggtaagttttttactttctggatcagtgatgattgattcatactatctagcaattttctttctttcccctaattggtagcattgggcagaatgagctaccttgttataatgagtttctgagaccattttaaggactcttcacagttcactgtgataaaagctatatatttgaagtactgtctcacacctttgttcaaaaggtacagagtatgtttattggggtctgtgtacgtaaactagacttcataaaacagttttcccaggatttttctttttcaggatggtagagaattttgtatatacttaaagctagagccttaaacaggttatttcacttttttctctatctttattttctctttactagatagattgtatcattggcaaaaggtgactttgccctagccttaaacagttagcatcccattttatggatggtaccttgttcttgacatctgcaagaaaatttgaggcaagaaaagttaaatggaaggatagattaaagtattatgtgacatgttcaaacactgcacatacttataattcggagaataatcatgctgtaatctttcattgtaggtcatgtgaaactaacagactttggactatgcaaagaatctattcatgatggaacagtcacacacacattttgtggaacaatagaatacatgtgagctacatgttaaacataattggtttgggggtaatagctaattttacctgttttaaggaatagtatctgttttctgtaccctcattgactctgtatattgtttttaaaattctaattcagatgatatgcaaatgggtgaatttttaagcatattattttcctcattgtagggcccctgaaatcttgatgagaagtggccacaatcgtgctgtggattggtggagtttgggagcattaatgtatgacatgctgactggagcagtaggtgcacagttaaaagctgcatgtattattggtctgtgctgagtcactatagcaagagacctgtcctgtgctttctgaacatgttaccagtggagttttcaaagcccaaagatttgttattagcagtttaacactaataatgctgtatgattatatgggatcccatactttccgaaacattttcttttaaatgatctatgtcatggcaggcctgtgaaatagatgttgaatagataatgcccttattttataaatggagaaattgaagcataaaatcacatagctcacttatcacacagaaagttaatggtggaaacacaggcttccttccaggacactgctacttcctctgtcctgttgcttaaaaactgcacgtctgccggccacagtggtgcatgcctgtagcctaagctactcaggaggctgaggtgggaggatcatttgagctaaggattattaatagaatctagccttgacaacatagttgagaccctgtctgtaaaacaaaataaaggtctttagcagttagcccatttcacagcatacatttctgatctccatgtataactaatttaggaaatggataatattattcaaaatttgtttcttatatgctaatatttttctctccctgctaatatttttcacttgtcttctactcttagcccccattcactggggagaatagaaagaaaacaattgacaaaatcctcaaatgtaaactcaatttgcctccctacctcacacaagaagccagagatctgcttaaaaaggtaaggttcttaaatggtcactgacactacaagattcaatgactaggatttaactagatagaatttaatgtatattttgaataaagagtcatatataaatattgaacaaaaaagtcttcaatttttgaaggcgaagtacagatttgtttaaagactttcttttcatattctttttttaaattttttttttttgagacagggtcttgccctgtcacccaggctagagtgcagtggtgcgatcttggctcactgcaacctcagtctcccaggttcaagcgattcttccgcctcagcctctcaagtagctgggattacaggcacccgccaccacgcccggctaatttttgtatttttagtagagacagggtttcaccgtgttggtcagtctggtctggaactcctgacctcaggtgatccacctgccctggcctcccaaagtgctaagtgctgggattacagacccttaaacaatattaagtagtaattagtaaactatattttcttttcttttcttttcttttttttctgagatggagtcttgctctgtcgtccaggctggagtgcaatggcatgatcttggctctcactgcaacctccacctcccaggttcaagtgattctcctgcctcagtctccctagtagctgggattacaggtgttcaccaccacgccaggctaatttttgtatttttagtagagaaggggtttcaccatgttggccaacctcgaactcccaacctcaggtgatccacctgcctcagcctcccaaagtgctgggattacaggcatgagccactgtgcctggccaataaactatattttctcaagccaaagtagacaagcacagtctaaaaaggaaaaaaaaaaatcagtttgactaaggttctttatccaagctttttttcctctttaaagctgctgaaaagaaatgctgcttctcgtctgggagctggtcctggggacgctggagaagttcaagtagggattggcatctttggtgttttgtggggaagataatgctagttttatgtatttctgagggttatatgtagttgcttataagtttagcttattttgtgacttgtaacttcaaaaaggtgattaatttatcaatccagcaaagtctagtcccctcaacttttcttcctgctttttttttcctaggctcatccattctttagacacattaactgggaagaacttctggctcgaaaggtggagcccccctttaaacctctgttggtaagtatacatgaaagtgtataattgggtgcagtggctcacgcctgtaatccccaaactttaaagggccaaggtgggaggattgtttgaggccaggagttcaagaccagcatgggcaacataacaagactccatatctacaaaacatttaaaagttagctgggtgtggcggcttgtgcctgtaagtcccagctacttgcaaggctgaggcaggaggatcgcttgatatttttttagaataagaaaaatctcagagcagacagaaacattatttttattagcagttcaaagatctctggtctatcctctccagcatctttattttattttattttgagatggggtctcactctgtcacccaggatggagtgcagcagcacgatcacagttcaatgcagccttgacctccccaggctcaggtgattctcccacctcagcttcccaaatagctacgactacagacacgtgtcaccatgcctagctaatttttttgtattttttatagaaatagggttttgccatgtcacccagactggtcttgaactcctgggctcaagtgatccacccacctcagcctctcaaagtgctgggattacaggtgtgagcttctgcacccagccaagcatcttttatttttgtactatcttgtaaagaactaaacccagtggcaattgactgtattagctatttttaagtcagttacctaagacaaatatttcaggtagttgggactttcctttttttggtttgttttattttgcttaatttaaccattttaaatatgattctctgggaattttttcttcaaagtatagaatatgtgtgcattcgtttgctaggcttgctgcaacaaagtaccacaaaccgggtggcttagacaacagaaatttattatctcatagatctggagactagaagttctagatcacattgttagagttggtttctttgactactgtgagaaactgtatgttccatgcctctcccctggcttctggtggtttgctggtaatctttgtcattctttggcttgtaggtgcatcacccggatctctgccttcatgttcacatggtgttctacctgtgtgcatatctgtggccaaatttcccctttttataaggataccaggcatattggattagggttcctctctactccagtaggacctcatcttcactaattacatctgcaataaccctttccaaataaggtcacattctgaggaactagaggttagaatttcaatgtacgaaattttttgggggtgggtaaggcacacgattcaacccataacaatatgtttgtgagtaaatcagttagtgtgttagttattgtccttctcccacctcagaatctgagaaaatacagtttctttttccattccttaggatgtagttggagaaggaggaggatgatgatggtgattattttttggtcatggagcataatgtccccactttaaaaaacaacaaacaattgtaaggaagttaactgtcatatacctactgcccagcttaaaaaatgattaggtcatcttgtttaaacataactgccatcccatcatcacacctcagaagttgacagtttccttagttgtttttttttttttttcctttttcttttctttcttttttttttttttgggggggggatagggtctttctctgttgcccaggctggagtgcagtggcatgatagtggctcatggcagcctcaacctcccaggctcaagggctcctcccgtatagctggggccacagggatgcatcaccacatccagctaatttttaaattttttctagagatgaggtctccctgtgttgccccacctaattttttttgttgttgttgtttttccattttttttttctcctgtttgtaaggatttaatcaaggtctgtatatagtttggttactatgtctcttaggtctcttttcatttatagattccccttgtgatttattgaagaaactgggtcatttgtcctgtagaattctcaaattttgattttgctgatgttatccccatagtttcattgaccatgttcatctgttctctgaatttccaaaaactggtagttaaatttaggtggttgatctaattcagattaaactctcagtattgcatgctttgatcaggaggcataatgtgtagtttgtgtgtgtgtgtgtgtgtgtgtgtgtgtgtgtgtgtgtgtgtgtttaagtgatgttagtggtcactgatcattgcctatgtcagcatttcactaccagggtaatttggcaatgtctggagatacactgattgtcacaggttgggggagggaatgctataggtaccttcaggagtaagagtcagcacagcacagccccctacagctaagcgttaataggcctaaaatgtcagtagcactgaggttgagaaactctggcctacttttataatttcatcaggtgtttgtgaaatggtcttattctaactgttatttcttctttctttgttagctggaattctttcataaagagaaactctttgatcagttagttacccaaggtatagttcatacagtaaaggcaggatgtatgtttgattctttcctagttttcaaaataatgaattagttccctagcatcttccagaattgaccaatgaactttgtgtgtgtgtgtttttttcttttttagtatattatgaacttatatgttttaacacatttgtgtttcatttcatcgcagttatttttattttatttttatttattcatttattgttttgaggcagggtcttactctgtcacccaagctgtagtgcagtggtataatctctgtctactgcagccttgacttcccggcctccagcaatcctcccacctcaccctcttgagtagctgggaccacaggtacaccaccatgcccagctaatttttgtgtttctggtagagacggggttttgccgtgttcaccaggctggtcttcaactcctgagctcaaaagcaatccacctgcctctgcctcccaaagtgttgggatgataggcatgagccactgcacctagcagttatttttattgatgctcaatttttcccttcgttgaatgctggtgcagtgaatgctgggtgcatcttcatgttggtttctgagtccttttgacatgaccacatggtctggtgttgtacgagagagcaaaataaggaaactggtgttctatgcttatcttgtacattttccccacacttggaatcagccattcctccagggagtgcaggttcacagtctgggctctaagagaattataaggtcaatgtggtcatcttttagtattaagtcagatattctaaattattatttacttcctacatttggcccaagagtctaaccagatattttgggaaagagagaaggaattaaataaataaatctcatggttagaactgaagtgataactatactttcacaaggaaatataacttataaaccatgcagaatagaaaattatttttgttcctttagatttctaaaggaatgaaataagctgtgggaagaaactttaactggagcatcttaccagtgttattcatgttttaactctgcttcagtagtttttcaggtttattacaaacctgcagtagccaactgaactaattatctctaaacagggatttagccagtggactaggcacactgaagctttgtgagaggggaaattgatattaacattttttccagcttgttttgagctcgatatattcacttttttttttttttttttttttttttattgagacagactctcgcactgtcatctgggctggtgtgcagtggcacgatctctgcttgctgcaacctgtgcctcccgggttcaagcaattctcctgcctcatcctcctgagtagctaggattacaggcacacgccaccatgcctggctaattttttgtatttttagtagagatggggtttcactattttggccaggctggtctcaaactcctgacctcatgatccgcctgcctcagcctcccaaggtgctgggattacagacgtgagccaccatgcccagtcgatatattcacatttttaataggaataactgtatactaaaatctattttagtgcatgtttaagatttgaagatgtaatttgactcagtactttccacctacatttttttcttcattctgtgcctgctaagactattctaatactttattatagttaacccccgtgaaaagagctcccagagcttacagtgcatttgattgatgtaacatggactatttattattttctaaattattttgtttgtataaagcaatctgaagaggatgtaagtcagtttgattccaagtttacacgtcagacacctgtcgacagcccagatgactcaactctcagtgaaagtgccaatcaggtctttctggtaagtgaaagaatttccatgtagtcatgggaaattttagtgtgaggatgggctcttcaaagaaaattcagtttgcttgctttgcagttcatgtaggtaacctggcccacttttttttttttttttaaataagccatgcctttataacttattgatgcctacaaaatttattttcataatccaacattttattttagcaattagagtgggaatgtacaaatctttggaaagtatgattcccttttttttttaggccacagacttaaaatgatgtttggcttagcatctcaaccaaaaattagtcatagcagtcggggagaaaaacctcactgactacatgtattttattcctgaaacagctatagatttttggtactttttttttttttttttttgagacagggtctcaccttgtagcctaggctgggtgtagtgtagtggtgtgatcacagttcactgcagccttgacctcccaggctcaagtgatccacccatttcagccttgtgagtacctgtaccacaggtgtgtgccacatgcagctaattttttatttttttgtagagacagagtctcactattttactcctggactcaagctatcttcctgccttggcttcccaaagtgccaaaattataggcatgagccatcgttcctggccctatttttggtactcttaacataagtaggggatttttttttttttttttgagacggagtcttgctctgtcaccaggttggagtgcagtggcgcgatctcagctcactgcaacttctgcctcctgggttcgagtgattctcctgcctcagcctcccgagtagctgggactataggcgtgcgccaccacgcccagttaatttttgtatttttagtagagacagggtttcaccatgttggccaggatggtctcgatttctttttttttttttttttgagaaggagtctcgctctgtcgcccaggttggagtgcagtggcgcaatctcagctcactgcaagctccacctcccgggttcacaccatcctcctgcctcagcctcctgagtagctgggactacaggtgcccgccaccacgccaggctaattttttgtatttgtagtagagacggggtttcatcgtgttagccaggatagttttgatctcctgacctcatgatccgcccgccttggcctcccaaagtgctgggattacaggcgtaagccaccacgcccagtcgatggtctcgatttcttgacctcgtgatccacccgccttggcctcccaaagtgttgggaatacaggcatgagccaccgtgccaggccaagtaggggatttttttaacattaattgtgaatatttgacatcaaaacatattggttcatatgtaatagtgaattctcattgtagaaatgtctgtatagatttatagcttgtctcctcagaaaagtaaaggtttttgatgttggccaacagaaatgatggatttatatcagaagaccatgaatgcatactattttgctcaaatagcacatatgcttgttgattttattactgtacttaatatgtcacatgaacatctatctcattttgtatcctttttttttcttttgtcatttgtttttggactactctagggagaatagaatatggggaaaataattgtttgggagtgttttttccctgtttttgagttcactggatttgtcactaacttaattcttaagcttttcttccccacattgctcactatgtaatacaagtagtgttgtatcttatgggatgggaaataagctctaaagttagcatggagttggggcatggtggcttatggctataaccttgaggtcaggagttcaagaccagcctggctaacatggtgaaaccccatctctactaaaagtacaaaaattagccaggtgtggtggcatgcacctgtggtaccaactacttgggaggctgaggcaggagaatcacttgaacccgggaggcagaggttgcaggagccaagattgtgccactgcactccagcctgagcgatagagtgagtgagactccgtatcaaaaaaaaaaaaattaattaaaaaaattaagttagtatgggatgcaaaagttgtgtatagtacagtatggttttgagtaaacaacactgaatagtaataatcctataaattaatatagagcacataggcaaaatatagtcttacagtattacataagagataaaagatgagtgagtgcatgcatgtttttaaattcaagtttgatgtgtgcatgatcaaagttacggcatctctgttagtaaaatcttaggttcagttagggaagtgggcatgaatcactttaattttggcattttttttctctcatgtactacagatgtggaatttatacctttgatttaacatagagaccttttcctcaattggacattgcagaatttcaacttatgtgacagttttccccccacaaaatagaagcattttatttagctgccaagaaatccaaagttgtggtggtaaaagtgagatattgaagctttcgttgccagttaaagtattgttgagcttttcacaattacttaaattggctaatgaatagagcaactcatttgttaggttgtagccagaattctctacataaagtggatctctttaaacattaataaaaaaaaataggtcaggtgcagtggctcacgcctgtaatcccagcactttgggagtctgaggtgggcggatcacaaggtcaggagttccagaccagcctggctaatatggtgaaaacccatctctactaaaaatacaaaaattagccaggcatgatggctgtagtcccagctactcgggaggctgaggcaggagaatcgcttgaacccgggaggaggaggttgtaatgagctgagatcacgcccctcactgcactccagcctgggcgacagagctagaatccatctcaaaaaaaaaaaaaaaattatatatatatatatacacatatatatatatacacacatacatacacacacacatatagtgacatcccacttatctggataatgtggttctagcaacctcatttcaacaaatattttaattcctgttgtaagaccccatcacagaattagaggaaattcaaagatgattaaggcacagcctgtacctcttggtagttacagctttagtccaccagaacgtttgtaaaattattctctgaagttcacatataactgtcacaaatcatatgcacttcagaattgcacctcactctttgggacttcactcagagctttgctgagtcttatttattgtaacacataatgcttactcatagattttgataaatagaagataggtgaagatggttaaaagaatgaacattgacagctagagaaatgacagctggtagcctaatagtaagatccaagagagaactaaaatgaacaaaactgcatttttgcctattacaactgaaggtttttgaaatgttgatacttattcatcaagaaaacaccaaattctagctgggcagagatcacacgtgcctatatagtcacagctacttgaggggctgaggtgggagaatagcttgggtccaggagtttgaggctgcagtgagctatgttatcaccactgcactccagcctgggcaatatagggataccccatctcttaaaacaaaacaaaaaacgaattctgtccaatcattggcgtaaaaccagaaagatcacaagatctgactttgatgccaagtcagaaaattgtttttactttggtctgattataagaaactgttttagggtgataaacttaattgcttatatgcctgtggctagaaacactagaagtttctttacatttctcctagtatttaacatcttttttttttttttttttaatttttgagatggagtcttactctgttgcccaggctagaatgcagtggtgcgatctctgctcactgcaacctccacctaccaggttcaagtgatcctcctgcctcagcctcccgagtagctgggattacaggcgtgcaccaccatgcatggtggtgtatttttgtatttttagtagagacggtgtttcaccacattggccaggctggtctttaactcctgacctcaggtggtctgcccgccttggcctcccaaagtgctgggatgacaggcgtgagcccccgtgcctgggcgtatttaacatcttcatatggagcctgaattttcctgtttttttttctattcctgtcagtagggtagaattttgtttgctagcatatcaggctcaatggaattctgctttcttgaagtgtgtgcctcacgaaatggctggaaagaagttaacgggtctaaaaatgaggttgaggacgtgggagagtgtacacattggtggttttaggtgtgcatcattgtgtaggtatgtcagactgaacaaccccattctcttgagatacatgacaaaatgccattctgtagtccactgttactgtctttcagggttttacatatgtggctccatctgtacttgaaagtgtgaaagaaaagttttcctttgaaccaaaaatccgatcacctcgaagatttattggcagcccacgaacacctgtcaggtatttcacactcttattttcacttttttttgtttttaaacaacctacaagagtgtttgcttaagaagtttatgccaagttatataaatgaaagactgtcatactctctttggttgacataagcacagcatctatatcttacattgcaaaggactagtctgactaatctatgatgttatatggtttaccttccctcccaaaagtaagcagccatactggcaaatgtcctctttatccattcactcagcatttattgtgcaccaagagcaccagcactacatactgcatgttatgtgtgtgtatctatatagtactataatacaggaattgtccctgtcctgatgaagcttacaatttagtgggaaagtcacaatagacaaaggatatacaaaaatataattacaagtagtgcaaagtgctataatttaaaaggggaaaaaaagaatgtactggtagagagcagaggaaaaacaagggggcttctactcacagtgatcagagaaaggcctccctggtgtagtaacatctagcagtgaacggaaagagccagccctacaaaaataggaggtataagaatgttgcaggcagaagaacagcaaatgcaaaaaccctgagggaggagaaaagttgcccttttcctggaagtgaaagggaaatcagtgttcctggagtgtgtggtgagtgaggagaagggcagaggtttggaaaagtattttattttaaatgcaatagaaagctgttttgagcaggggagagtaaaatgatatatataatacgcatttaaatgtatatatatctcattgagggttttgggggtcaggtgtagaggtaaagagaccagttaggaaattctagcagttaatctaggtgggggagagatggttcaatttttgcctttgtgctaatccacgtgaaaataaaattaaatgaaaataaatgtcatgttaccccactccctttaaacgtaaaggaaatatgtcttgttgagatgacccttaagcaaatgaatgatagctcttccttgtcttaaagcccagtcaaattttctcctggggatttctggggaagaggtgcttcggccagcacagcaaatcctcagacacctgtggaatacccaatggaaacaagtggcatagagcagatggatgtgacaatgagtggggaagcatcggcaccacttccaatacgacagccgaactctgggccatacaaaaaacaagcttttcccatgatctccaaacggccagagcacctgcgtatgaatctatgacagagcaatgcttttaatgaatttaaggcaaaaaaggtggagagggagatgtgtgagcatcctgcaaggtgaaacgactcaaaatgacagtttcagagagtcaatgtcattacatagaacacttcagacacaggaaaaataaacgtggattttaaaaaatcaatcaatggtgcaaaaaaaaacttaaagcaaaatagtattgctgaactcttaggcacatcaattaattgattcctcgcgacatcttctcaaccttatcaaggattttcatgttgatgactcgaaactgacagtattaagggtaggatgttgcttctgaatcactgttgagttctgattgtgttgaagaagggttatcctttcattaggcaaagtacaaaattgcctataatacttgcaactaaggacaaattagcatgcaagcttggtcaaactttttccagcaaaatggaagcaaagacaaaagaaacttaccaattgatgttttacgtgcaaacaacctgaatcttttttttatataaatatatatttttcaaatagatttttgattcagctcattatgaaaaacatcccaaactttaaaatgcgaaattattggttggtgtgaagaaagccagacaacttctgtttcttctcttggtgaaataataaaatgcaaatgaatcattgttaaccacagctgtggctcgtttgagggattggggtggacctggggtttattttcagtaacccagctgcaatacctgtctgtaatatgagaaaaaaaaaatgaatctatttaatcatttctacttgcagtactgctatgtgctaagcttaactggaagccttggaatgggcataagttgtatgtcctacatttcatcattgtcccgggcctgcattgcactggaaaaaaaaatcgccacctgttcttacaccagtatttggttcaagacaccaaatgtcttcagcccatggctgaagaacaacagaagagagtcaggataaaaaatacatactgtggtcggcaaggtgagggagatagggatatccaggggaagagggtgttgctgtggcccactctctgtctaatctctttacagcaaattggtaagattttcagttttacttctttctactgtttctgctgtctaccttccttatatttttttcctcaacagttttaaaaagaaaaaaaggtctatttttttttctcctatacttgggctacattttttgattgtaaaaatatttgatggccttttgatgaatgtcttccacagtaaagaaaacttagtggcttaatttaggaaacatgttaacaggacactatgtttttgaaattgtaacaaaatctacataaatgatttacaggttaaaagaataaaaataaaggtaactttacctttcttaaatatttcctgccttaaagagagcatttccatgactttagctggtgaaagggtttaatatctgcagagctttataaaaatatatttcagtgcatactggtataatagatgatcatgcagttgcagttgagttgtatcaccttttttgtttgtcttttataatgtcttcagtctgagtgtgcaaagtcaatttgtaatattttgcaaccctaggatttttttaaatagatgctgcttgctatgttttcaaacctttttgagccataggatccaagccataaaattctttatgcatgttgaattcagtcagaaaagagcaaggctttgctttttgaaattgcaactcaaatgagatgggatgaaatcctatgacagtaagcaaaaacagaaccatgaaaaatgattggacatacaccttttcaattgtggcaataattgaaagaatcgataaaagttcatctttggacagaaagcctttaaaaaaaaaatcactccctcttccccctcctcccttattgcagcagcctactgagaactttgactgttgctggtaaattagaagctacaataataattaagggcagaaattatacttaaaaagtgcagatccttgttctttgacaatttgtgatgtctgaaaaaacagaacccgaaaagctatggtgatatgtacaggcattatttcagactgtaaatggcttgtgatactcttgatacttgttttcaaatatgtttactaactgtagtgttgactgcctgaccaaattccagtgaaacttatacaccaaaatattcttcctaggtcctatttgctagtaacatgagcactgtgattggctggctataaccaccccagttaaaccattttcataattagtagtgccagcaatagtggcaaacactgcaacttttctgcataaaaagcattaattgcacagctaccatccacacaaatacatagtttttctgacttcacatttattaagtgaaatttatttcccatgctgtggaaagtttattgagaacttgtttcataaatggatatccctactatgactgtgaaaacatgtcaagtgtcacattagtgtcacagacagaaagcacacacctatgcaatatggcttatctatatttatttgtaaaaatccaagcatagtttaaaatatgatgtcgatattactagtcttgagtttctaagagggttctttatgttataccaggtaagtgtataaaagagattaagtgcttttttttcatcacttgattattttctttaaaatcagctattacaggatatttttttattttatacatgctgttttttaattaaaatataatcactgaagtttactaatttgattttataaggtttgtagcattacagaataactaaactgggatttataaaccagctgtgattaacaatgtaaagtattaattattgaactttgaaccagatttttaggaaaattatgttctttttccccctttatggtcttaactaatttgaatccttcaagaaggatttttccatactattttttaagatagaagataatttgtgggcaggggtggaggatgcatgtatgatactccataaattcaacattctttactataggtaatgaatgattataaacaagatgcatcttagatagtattaatatactgagccttggattatatatttaatataggacctattttgaatattcagttaatcatatggttcctagcttacaagggctagatctaagattattcccatgagaaatgttgaatttatgaagaatagattttaaggctttgaaaatggttaatttctcaaaaacatcaatgtccaaacatctaccttttttcataggagtagacactagcaagctggacaaactatcacaaaagtatttgtcacacataacctgtggtctgttgctgattaatacagtactttttcttgtgtgattcttaacattatagcacaagtattatctcagtggattatccggaataacatctgaaagatgggttcatctatgtttgtgtttgctctttaaactattgtttctcctatcccaagttcgctttgcatctatcagtaaataaaattcttcagctgccttattaggagtgctatgagggtaacacctgttctgcttttcatcttgtatttagttgactgtattatttgatttcggattgaatgaatgtaaatagaaattaaatgcaaatttgaatgaacataaatagaagtgatttatttttttattatcttaaagataggaaggaattagtatacgtatcaggtgtataaatggtttaaatttattttaacatgtcagatgtgttcaagttgtcatataaataaactatgtatgtaaggaatgggttaaaagctgttctgctgagaaactgaagctatttaagtatataacaagttttagtattgatttttaagttagatgttacacatctttgattttcaagttatgtcagatagtagatatgaattgtttacttaaaaaaatacatgtaacaatctacgtgaaagctagcttcataaaaaactctaggaagaccttcttgtgctaacaatcaacaatctgttcagctacacttggtcagctacatttgataatttgatatgtatgcacaaaataacgtagtgaacaaatgtgttttaactaatgtctcaatatatctagtgtaagctgggtattttgcattaaccacttcttttctgtgaggtaattataccacacttgccaaggggatttctctacagaagctctcaaactgatcttaccttgctatacaacatagtagcctatcaatactggtaaaacaatcttttagaagccatgatctgaattcacagagtaaatgagtttctgaatctacattacctgtttttgaggtgaaggaatagagggatggaagaaatgcttccagttcatcagcatttttattggatggcatagctccattagattttctcccttttcaatttataggtaaactgcattccaaaaaaaaaccccaccatgcacctccttggttatgtaatcacattcattaagaaacagtgctgtctgaatagttacagagtaagcaaatgtattaaataggtattctaatagggctgaagtaaaatgctattcttgtatttgaacaggaagtcatcttggctatccttcacagccgaattgtaatcccacattgcttttctcacccatcctctgccgtatacctaaataatacaactattagcatcaccacaaagccatttaaataatatttgtagtgggtctcaaagtagataacagagtaaaatatactgtaattgaatatagttgtacttacaacctggtagtatttacctggagagaaaaaaatggtacaggcttcctaatgtttgtttgtcaatttggatggctgtacagtcatggaagtgccttctataaccagttggtcagtttgctaaactaaacaattcatttgctagtttagcttttgtcttatcagtacagcaaatctgttttctacctctgcttcctaagttctttctaccaccttttcctcgactacaaactgatagatgtactctaaacttggatataagcactagcagcccttcagacatgttttagatttcagattcctccttagaggtaacaaggggagaaagtgcttcattctcttttctagcaccctgcacaaatacctagaggcgaacaaaccacactatcaaaacctcatgaccacctctcagtgcgagcttcaatcttccaattgatggtgattcaagcataaaattccaaaacttttatggagaagactaattataagggcaattttttataagattttagggcatctgtcttgaaacttttttcttttaaatagagatgggatgttgcccaggctggtcttgaactcctgggttcaagcagtcctcctgcctctgcctcccaaagtgctgggattacaggtgtgagccaccatgcctggccatttgtcttgttttctatactattcaaatcatcaagtaagccagctgtttataatccacatgaattattttaatagttacttcgagatactccatggtactatacaaaaagcatgatcatgaacattaaagctgatggcaggaagaatttatgacgtccagagacaaaatgaatttaaatcatttattttcacttattactaatcttactacagagaataatacaatactataatgtatcatcctcagtaaattaatcttcacttagaaaatgttactgataaaatacaacatttagaattttcatttaaaaatacaaattttatgaaaatattaagaatttttaggatgggaattataaaagtcaatgctgaacaaaattctacttttagatagtatgtatcttaaaatattatgaaaaatattctttattctgaaaacaatgtcaggaaagaatacctgagttctctaaaaccactagttctaatttcaaattgctgttttggtaacataaagaaaacacatttacaatttaacactgcagttacctgtcaaataattagaatagaataaatgttgcatatacattaggttgaacattatatatattttaaaacacagggtggtttcatttaatcttttggtgaattggatcataagtcctacattctaaaaccatctggaaacatttttctggtagccctgaaaatccattctgatgccttatcagtagtcattatgaccaaatgacattagtattttgtggccttgatagtttatacaacttaatatatttgaaggtgtgatgaagtggctccatccttccatttgtttatatggtctgaaatcacagttctgcagagtggacatgttttctctctgttaaaccataaggtcatgcactcttcacaaaatatatgctgtaatggaattaagaattagatttgatatttgataatcattttaaatccatcacattgtagggaatgaaagggattcttttttttttttttttgagatggagactgaagtcttgctctgtcacccaggccggagtgcaatggcaccatctcggctcactgcaacctccgcccccgactggttcaagtgattctcctgcctcagcctcccaagttgccgggattacaggtgaccaccaccaccatgcccagctagtttttttatttttagtagagacagggtttcaccatgttggtcaggctggtcttgaactcctgacctcaggtgatccacccacctcagcctcccaaagttctgggattacaggcgtgagccactgtgtccagcctgaaagggattttgaagagcactaatcccctcattttacaattgtgaaaatggagaacgtatgagacattcaagaagacaaagagcagtatgattggtagagccactagtgttctggctgtaccatccatttaaccataaaagctatccttaggtgacacctttaagattaagtatgataactgcttaaggtctttgagttactagtaactgccataaagtataggaaagggccacaatccagtaacaaatgtcagtattgttctacatggctagtatccaattataaaatagcctgttttttaatcactttggtattcaatctgccagttgaattattttttccccttcatacgctcctctgcataaaaattatcagaacataagggacaaaacttagccaatccactagtatgtaccctgaatgctaccttccactaaacactagatttttttttttttgccttacagcaaacataaatttgacttttgcaagtcacagagaactgttgtatttaggtttttaaatttaaaaatgtaattacctgacaaatgagaagaattggcttctgaaattcagcttgacatattgaacaaatatcatccacatctgaacactgtctcttgctggcagccactccataactctatgaagatagtaagttctgttcatctacaaatttctttctttcctgttcctcaaattacataagtaatgctgtacttctcaaatctccctggaaccaggcatttgaaaaacttcccaaaggatacaaacatctcaaagctgagccatatacagaaccacctcttgagtgcaccaaaatgaaatcattaaataatacataataggattttgaaagattgttagatctactagctttacaaaggatgatagtgcttcaaattcaacataactggcttaagagactaagcaatctgaaatgtaactattataaaatctatagccatgtattatttgacccaggactgccaaattgagcttattacctgcagcagtggttcataaagtcaatccagccagaggttggctggttgaatgtaactcatgtggaaagcttgctttaaaaatagatttctctgttccacacaatatcaattcactaggaccagacatattgggatgtgacccagtaatctattatttgaaaggtctccaagtgagtgcaatatgaagaagacttagggaccactgaagaattttctgccactaggtctaaaaattattcgaaattataaaaagcatttagtgctaaacataaaaaagttttacggagaaactgcaactgtaaatgtcgctttggtagaataactactgtcaaaactaactgaacaaaaatgcaattatttgaattttcttctcttctaatgtcctaataacaagttactcgtctctaagattttaacctcctcaccagattcagaacttagtcattaactagatgtgatgtcaataaccctcagtgaaatttggagaaatcaaaatgttacaaatgaaacctgctttctgtagaaatgatggggaagaggtaactaaagagatgtaagaacacccaagtcagtcacggtcatgagggtaaagcatgacttaacatagctgaagttatctaaacttcttgtactaaaacgtctcaggctaacaacatcaaaatcaaagtaaaactcaaaggataaagatattaaaaattgaggttttttgaaactggtaataaagatttcagaaataagtcaggatactgttagatgatcttggtgtcaatttcccttcagtaaggtgtcatttagcaaagtacatttgcagataattatgctgacaagcttttaagacgttactcatctggcatcttggagactccctctccagatagtaactgccatttccctggtaaaggagacttgaacaaatccaagtattgatgactgatatcctctctgtagtttgtctcagagaaagaatatcagggtattttcttgagagtatttcggcacaaatcttacaagaccaattatagtaaaatggttgatgctcacataatcatcagttgaactgacttggacaaagctgaactctctgaattttattatgtcttgtctagagaaacaagcttgcataggatgtagcaaagtttgtttctacattgctaactctatcttagggaaaaggccctggccagttagtctcgtttactttgtagacataattctttttttatttttacggtatattattcggttggcattcttttaagtcagtctccttgggccctgatgaaatgactgcaaaattgagaatcaaaccctgaagtctgctgaccacacataggtactaggaacctttcaggctactaagtggtaaattagggttctctatgacatcctttcactgcaatttgcaacatcaatagaatcacacaataatgttataaatgacaccagagactcaattaattgttaaatttcatgccatgaacgtatttatgcacatataattgagcaatggggaaatctgctccagtaagaaaactgcaagagacatgatttttggcagtgagctttctaaacaataaattacaatggaaggattttcacaggtgaataaggagttaataggaacaaacaaagcccccatttgtggattaaaaaagaggaacacaatttcataagattgttaagggtttacaagccttaaaaatgtccagtggattgaagaggcaagagacaagttcaaatatataagcactgcaacaattagcaggtggttgtcaatgtgtgattcaagaatctgatcacagagataaaactcctaaattattatagccccaagtgccaaagtactagaaaataatcaaagtaaaagaaaaggatcatctatttatgaaatccattcttgtaaaactgctgaactaaaaaaatttttgcagtgaagaaaggtgaaggtgtttttcttaactgataaaaagtacttactggttgtgtaaaaaatattcgtaaaacctgtctgaaagttctcagatgcccaaaaaattccaaaagctgaaaagagaaataagagatcatttattaattcaaacagtcctatttgctaaacccaaaaaccaaagctgaaatcccataacatcaaatcctcatattaacttaatgttcattatatgtcacatctaatcattttgtgctgagtattttattcaatttatagatttgagccatctcagcaagctgaagtacatttaaacacctagagtaacaatttgatcaagacaaatacaactatgtcaaagtcaaagcaattttatctgattcacctgtttttaacatttagattttaaagtttcataaagtgattattaggttgaggggtgcaggcatggagagaacaggacaagatactctactagtttaagaattatgtgtatgacaatgttactgttgaggatgggtatgttctattccacttgttttccctacttagataatccacgctatgtgaaggtcgactccccttccctccagtgaaacctgaggaccgctggattaagatagtctatttccgtttctccatttctaaacaaatatagaacctgctattacttcaaactagtgatatgaagataaactataaaactgttaaaagaggaaaacagtagtatgtatcagtaatcattaatgtgaatcatgcagtgacaagatttgtaatgttacctacttttaatatgaggtagagtaaagccagcagtatcccaagactccatctagttacgttaccaaactccccatagcttataaggtagcgaaaccaaactggtatgggaacaaaagttcggtagtattgacacaattcttctaaaagcatataccagtaaccctaaaaaataagaagaaaacaaatagagctacccaaactacttaactacatagcacaaacaatattagactgagaacactgagtatattatacaataatataaataactataaaattaatcttcataatgattatgactgaacctcaagctggttctcacatattacagtcactgagtggcctgctttgaaagaatttctaggttggacgcagtggctcccagcactttgggatgggcagatcacctgaggtcaggagttcgagaccagctggccaacatggtgaaaccccgtctctactaaaaatacaaaaattaactgggtgtggtggtgggcacctgtaatcccagctactcaggaggctgaggcaggagaactgcctgaacccaggaggcggaggttgcagtgagccaagatcacaccactgcactccagcctgggcaacagagcgagagacaatctcaaaacaaaacaaaaccaaaaaaaaagatacaatgagaatgttttatgtatactgcaagtaaaacctatgtgagtatgtttttgctgattataagaatttaaaagtttttagtgcatatgggaaaccactgaataattgtacatagtcaactgtcaattgataatgccctggagaacagaagtacacatctaaatagtttcccacatatgatgtggggactgattttaaaattattctgaagcaaatataattctgattttatccaaataggttaataatcaggttcaagtgcctgaacaaatggttgctaagctgaaataatacagataattaagctagttagcaaactgaaaaactgcaaaaggaggattcatttaaacaaagactaaatagcattaatgtgattcgataacatcactccaataaagcataagtgagtttcttaccttagatttaaaaggcatgatgaaagaaggcaccaataaaataaggcattttaagcccatgaaaaagaatttcagaatgaagtctgtaattccaacaatccaaaatacttcccagaagctcaaatggtccaaagtaggatttaaaaaaattaagctaccaaaagaaaaacatcaaaatttatcagagcaacatacaaagataaagtattaataaagggttttaatttgctacaaatattttattttgatatgtaaaaaatatgagtttggcaggatgtcagagttcacaataatggaatggaggatcattttgcttaaagagactttttaaacctgtttggattttagatcttcccttcatagaataaggaaaaagtcttcacggtttgtcatagttgacacctttctagcctgtaaatgaaaaaaactcatcaataccagacatctgctgtgtttttcttaaccaattccaatcaggattccatctcttcctttcaatgaattgcttgtcaagatcatcaactccctctgtatggctaaatttcaaggtcactctctttttccatcttccctccctgaataattttctttctagacttttaacacaacacttttctatttctcatatttcactgctggtttcttcttagtctcctttgctgtttctcttctaattgtggtcatgtccagtactgggctctctatctacactctctttcctgggttagttttgtccagtcctgtggtttttaaatatcaaccatatgctcctgataccaaaatttattgccttaacctctaccctgagttcatgacatatatttggaaccactttcttatcaattctacttagcctctcaaacttaacatgttcaaaacaaaattattgatttttctcctcaaaatcagttccttcctcaacccaatgaaatgacaccaccatccagccagctgcttagactaaaaacccagaggtcattcttgcttctctccacccacctatccaatccagtccatctgagggatactggctccacctccaaactatatcccagatttgcccatctctccaactccagtgaaaccaggtcttctaatattctaataaaagctgaaaattcagaatactcccatttgacatggagacttatcagctactgtcatttagtaagtgttcttactttcagaaacaacgaccaataataacaacctaatggtactttaaaaatacgaaatatgtaaacaaaaactcaggtatcaaaaaattaaatatttattgagcatctgttatgtgccaaggcactggggatacaaaatctgagtaagtcacttaaagctctcacttatgaggctgggtgcagtggctcacacctgtaatcccagcactttaggaggtggaggcaggcagatcacgaggtcaggaggtctgaccaacatggtgaaactccgtctctattaaaaatacaaaaatttgccaggcgtggtggcgtgtgcctgtaatcccagctactcaggaggcttagacgggagaattgcttgaacctgagaggcaaaggttgcagtgagccaagatcaagacactgcactccaggctgggcgagagagtgagactccgtctcaaaaagaaaaaaaaaaaaaaagctctcgcttatgaaaggagaaagttaaaaactgaactgaactgaatacaataagtactatgtgaagtaagatacaaagtgctatgaaatatatgattacattaaaaatgtaattgtgtatttggacctctaattacctgtaataaagtgactgagaatgaaaggtgtaatataaaagaacagaagatcctgctaagaataccagtaaccaagcacactgaatctttgaggacctttcctgaaagataaacaattttataatgttactttgattttgccagaattttaaatatcattaaactgttttactttaatgactattaacttagaatatttttctaaatcttaatatagaatatgttaaactgtacataatcatcacagttactgttttatactactttagtgaccaaacagaactcttatattaaacaaatgtttaaaatacaagtttcttcactgtatgaaaaacattacctatgtttcaaagaagccaagtcttctctcaaaaaaaaaaaaaaaaaaagaaaattaaattaaattaaaaaaaaaaaaaagaagccaggtcttctacaagctgacataaaggacccacccaggacgggggcagtggctcacacttgtaatcccagcactttgggaggccaaggtcggcggatcgcttgaggtcaggagtttgtgaccagcctgcccaacatggtgaaacctgtctctactaaaaaaagtacaaaagttagccaggcgccgtggcacgtgcctgtaatcccagctactcaggaggctgaggcacgagaatcacttgaacccaggaggcagaggttgcagtgagccaagatcacgccactgcactccagcccgggtgacagagcaaaacaccgtctcagaaaaaaaatggacccacccacaaaagaaaatttcaaaatgcattttaaccttgactcacttgtcaaggtttatattttttaaattctcagattataagaatttaataaattaatgttttaatctcacttttttaatatatggggtctcgacacattgctcagaattcctaggctcaagcattcttcccaactcagcctcccaagtagttgtaatctccctttttttttttttacttttttgagactgggtctcactctttcacccagactggagtgcagtggcatgatcacaactcactgcagccccaaccacctggggtcaggcaatcctcccacctcagcctcccagatagcagagattacaggcacgtgccaccacgcccagctaattttttgtattttttgtagagatggggttttgccatgttgcccaggctcgtcttcaattcctgggctcaagcaatctgcccatctcagcctcccaaagtgctgagattacaggcatgagccactgtgccttgcctgtaatctcacttttaaagtcaagtttaatgaagttttactaattttaaatcattaagatttttctagtttgataggtttaactataaatttccaggtcagaatgcatgatactttacacagacatagccatttaaagttgccttaaggtgaaattttagaaactcatcctctttttcccaatgatttatatgacgggctcgtgtaacttatgttatggaaaaattccttgggtttcattttctctctttttttttttgagatggagtctcactctgtcgccaggctggagtgcagtggcacaatcttggctcactgcaacctctgcctcccgggttcaagcaattctcctgcctcagcctcccaagtagctgggactacaggcaagcgccaccacgcccagctaatttttgtgtttttagtagacatggggtttcaccacattggccaggctggtctcaaacttctgacctcaggtgatctgcctgcctgggcctcccagagtgttgggatgacaggcgtgagcccctgtgcctggcccaggtctttttttttttttttttttttgagatggagtctcgttctgtagcccacgctggagtgcagtggtgcgatctcagctcactgcaacctccacctcccaggttcaagtgattctcctgcctcagcctcccgagtagctgggaatacaggcacatgccaccacacctagctaattttttgtatttttagtagagacagggtttcaccgtgttagccaggatggtctcaatctcctgacctcatgatctgcccgcctcggcctcccaaagtgctgggattacaggtgtgagccaccatgcccagccactaaaagtttttcatgatgatggtcttacttactatggtcaaagtaactgatacaacatgaagggacttgccaaatcagatcagataccgtgttctaactcttttaatcctttttactactttaacagtaaccaatttttttttcttacaaagaaggtaaggtgaaggaattcagcattaggagagataatttattccaggatttagataacaaatttaacataacgtggatgttacaatatatcctattacttcctatttctttcaagttatttcctatttctctcaaaattatttctctaaaatctatggagagaaacagttaataattttttagttgcttgttatacttactcttagaaaaacctgatttacaatgcttttgtttgcatacataaaagttgttagcagcccaattccaagagaaattcctgttagaaaataagttccagttaattgaaagaaaaaaaaatcaaagaggattatataagctaacaatgacacaaattaaaaataaacatatacaataataaaagctcacagaaaataagtaactggatgcattaagtagattaccaataatgaaagaaaattaactgaatttaggaatgaaaacaagtcaatgttttattatgtcctacctgttatatgctgcataacaagtttgacgctcagaatcaaaatatatggaagacttttttgcagccacttgaagagatagcggaattctgagaaggagctactaccatgatctccagattctgcggcagtatcatcagtcagccttgcttcactgtgggagtgaccccgtaagcgactgtgtacacatccatgggcacagctatggacacctgaccttatatttctggagcttgcattttctgcacattctttaggtatggagtttatctggatatgaacatctccagaatgagggcaagaaccctctcctgtcaatcttgtgtggacacactgaggggttgaggcatcctcactgcttccagttcctggaggactgtgcagttggctacgattggcttgcatggcccttaaatactttttctctgacccagatgtctttgcttcaggcctctgtctcctaaaaaatcaaataaaagatattctaagtaaacaggcagttaaataccagcagtatattcctcactgggtatcctttattcactaaaggagtagcaaataatcacaacagatgaattttcaggttatttatcactggactcctcccttctcccttaatgccaaggctctgctgccctacacaaatgatcttttagggaacatttgcaccaaaaaaaaaaaagttgagctgcaaatgcttccagttctctaatggcagaaggcatccgcaaaacagtcatgaagtatgggtacccagcagatgttaatgagcaccagtcctcactgggtactctggtacatttacttttcccaaatggtgcagtttcatctctgatgtagattctacatcaaagaagtttcataaggaagagtgagccagtattttttaatggttggaaatgttaggaaaaaaaacaacattaaatcttaatgccttattatcatcataggtaactaataataaacactgcacttaggtgacctacaaattagattttctgctcaagcagctttcccaaagctcataaagtttccaataattaatggtgccaccaataatattacctccccgcgcaaaagaatgttacctaaatacatttaaagcatagatactttggagagtcaccacgtaattgctaggtaactctttagtctgaataagcagttacacagtccgcccaataaaatgccaccgtcggtggtgtgtgtattacggagggaggggtgtgaggaaagaggactctagcagagaaagatctctctaataaatgatccagtgtggacctcctagaaacagaagaacagagtcggaatcccagctgacaaaacgcagaggctatcccacactgccgtgcttttcccgtttgtctaggaggaggctagagttaacgtcagggaatgttctgtgtcattctatttcactcccaggactgaacagtggtgcagtcaccgtgtctggcggtttgggtttcagtgcttttcactaaaggctttcaccgaggccccgacgccacgggtgttatttcgtcaaaactgaagagcgacgttggacagcaggctttcagtgtcttttctataaataacatagaaccctcccactttccttcatgcacagacaagaaagaggagaaaaaagggaagaaaattcaacacaactcttccggaatctccgagggcagagttctccacccacgtccgagcctcgagtgcctattctccccagagccccctgcgccgcggcccctcgccgcctcctcctctgcccgcttcccccaggcctaacctctcatgaccagaagcggacggaggtgtcgggagcgacagcaagaacagcggcatacaccgcctccagcccttcagtcggggccatcaaccgcaaaccccgcaagctcttctctcagcccggcggcaacggcggcggcgcgcgcgctccccggacgttctcacgcgcgcgcgcgcgccctgccccggctccacctcctagccccgcccccgcaccgcgccgagtggagagctcacggctgccggggtgttttggcagcgagaacaagcgagctgcgcctgagaacggccttcaggcctggcgctaaataataagtcgttgttatgtgttatgtatttatgtggcatccaccacacgcctccgagatcctgggcgttttgaggttaaaaatgttcaggcttggagaacctacccctggaggagtgttagggtttccgggctcggatgtccgcgagcttgacgcctgacctagttgtgtctgtctgggcggtgacgtttggtctgagctgacctttcctcacaatcgtgaatttgggctgtgaggatcaggccttgtcagaacccgagatgagaggagagaggtgcggagagtctgcgtggggtggaagtagaagttagagttgaaaaacctgtcttgcgtggggtatagaggaccctactgccctcaaaataattatgttaatctaaaactgttctaaaattaaaaggttattaagaaaacgaagtttaggtcgggcgcagtggctcacacctgtaatcccagtattttgggaggccgaggcgggcgggtcacttgagctcaggaggtagagaccagcctggccaacatggtgaaacccgtctctattaaaactacaaaaattagccgggggcgttggctcacacttgtaatccccgctacagatactcgggaagctgaggcatacgagaatcacttgaacccgggaggtggagtttgtagtgagccaagatcgtgccactgcactccagcctgggcaacagagtgagtgagactcggtctcaaaaaataaataaataaaataaattctgttaatctaaaactgttctaaaattaaaaggtcattaagaaaacgaagctgaggaggggagtggtagctcacacctgtaatcccagcactttgggaggccaaggcgggtggatcacaaggtcaagagatcgtggccacatcctggccaatatggtgaaaccccgtctctactaaaaatacaaaaattagccgggtgtggtggtgcgtgcctgtaatctcagctactcgggaagctgaggcaggagaatcgcttgaacccgggaggcggaggttgcagtgagccgggattagccactgcactccagcctggcaacagagcgacactccgtctaaaaaaaaaaaggtttaggcctggcgtggtggctcacccctgtaatcccagcgctttggaaggccgaggcgggaggatcacttgaggtcaggagtttgagaccagcctggccaacatggcgaaaccctgtctctactaaaaatacaaaaatcacccgggcttggtggcgggcgcctgtaatcccagctactcgggaggctgaggcaggagaatcccttgaacccaggtggcggaggttgcagtgagctgaaatcgtgccactgcactccagcctgggcggcagaaggagacccccacctcaaaaaaaaacacattggctttctttttttgttgggggtgggggtaggggtggtcggcggtggtagaaggcatacttaagtctctctgtgcttactaatttaaatctttctgacagatttctggttcagtaagggtgagagccaggctccagactatagtgaattttccgaggagatatgtgtaagtattctaacatttcaactatgtcgtggatatttttaaacttcaaaatgtgtgaacatttaggaaacaggaaaaaaaacagaatataacataattcagccacagccacaatgcagcaccaatatgtattagtacactgataattttagtacatttggtacatttgtaaatttagaataccaaatgtagtgtttaaattctcatcttggccagatactacggttcattcctataatcctagcactttgggaggctgaggtgaaaaggtcgcttgagcccaagagatcgagagcagactggacaacatagagagaccctgtctctagaaaaaaatgttaaaattagctgggcactgtggcaagggcctgtagtcccagctactcaggaggctgaggtgggagaatcccttgagccagggagattaaggctgcaatgagccgttattgctccagtctgggaacagagtgagaccctgtctcaaaaaaaaaaaaaaaaaaattctccttttgacatactcataacactgcaggtatattagtccatatttaaagtttattagtgcacttggagctgcatttcacccaagtaacttgactgaaaagtgacatatttgaagaaagaaaggactgaattgatgagaagatttgacttggtgacaggctattatctgataaattttctttccactggcatctggactgttggaaatagacattttaattttaattggttaattcaaaaagcattttccaagtacttactgagtgttaagaataatactagatgttggagagagagacataataaagagtctcgggccaggcatgatggctcacacctgtaatctcagcactttgggaggccacagcaggtagatcacttgaggtcagcagttcaagaccaacctggccaacatggtgaaactccatttctgctaaaaacataaaaattagggccaagcacaatggctcacgcctgtaatcccagcactttgggagggtgaggcaggcggatcacctgaggtcaggagttcaagaccaggctggccaacatggtggaaccccgtctctactaaaaatacaaaaattatcgaggtatggtggcacgcgcctgtaatgcagttactcaggaggctgaggcaggagaattgcttcaacctgaggcagaggttgcagtgagccaatatcatgccactgcactccatcctgggcaacagagcaagactccatctcagaaaaaaaagaaaaagaaaagttgccatctcatggtgatggaaatgtttagacctgcaaacaaataattacagtattttggagaaaacactataattgaaggttctgtgagatgcaatggaagcaaaaggtagaagcatttaactttgtcagggaagaaatcttttattaaatttgtgatatttaagatgaaatctttttttttctttcttcttttgatagagttttgctctgttgcccagggtggagtacagtggcgcaatcttggctcactgcaacctctgcctcctgggttcaagtgattctagtgcctcagcctcctggatgaaatcttaagaataagttgatatttaccaggacagaagcagtaacagggcaatgcagatagaaacattatatggaaaatggtggtattgaaataccatggtcttttaaagagtgtttttcgtatttggaagagtagagtggatagagtagtaagagataagtcaggtaagtatgagctagaaaatgagtttgtgggcctcacttagtttattctaatggccaaaaggaagctattgagttttaagcaacagaattgtgtgactggatttgtgtttttcagaaaattcatatgctgatagtagcagtgcaagctccattaggagactattataagtagttcaggaacaagatgaggtcttgaacttgtcagtgaagtgggattcaagaagaagaatgagattggagaggttatgaaatagaatcagtagggttaagtgtcctagattgttgcagttaagctcgtcaccccctctactacccacacaaatttttcacacctaccaatgtccatatgcttgggtagtctcctcgcagactgatttaagtgatttgctttgatccttgggacaatagcaattgtaatgttaatagagacttgaaaaattcttctccattgggattcacactcttactgttggcaaccctttgccacaatttgattaaattaaggctggcctcctagaagatgagaccactttgagagtgtccctagctctaccagccttcccagttgtctcagcattctctgttgaagccccaaacatatgtgtgaagccatcctagagtgagccagtctacacatagaattataggaaatacagattcttttctttctttttgtttgagatggagtctcgctctgtcacccaggctggagcgcagtggcatgatctcagctcactgcaacctctgcctcctgggttcaagctattctcctgcctcagtctcccaagtagctgggactataggcacctgccaccatgcccggctaatttttgtattttagtagagacggggtttcaccatgttggccaggctggtcttgaactcctgcccttgtgatctgcccgccttggcctcccaaagtgctgggattacaggcatgagccagcgcacccggcctatagattattttcttttaagcctctaggtgtggggcagttggtttcataacaagattaactgatagcctaactgaccaagcatatggggcagataagagaaatagtctaggacaaatcttcattttttagcatggatggatggataaatcaatattaggaagctatgttagaataagtaaactggtggcattaccagatgaatagggaatttttttgaaagaccaagtttggagagatatcagtaaatttggcttggaaacactgagtcttaggagttcctgggaaacacacaggtgaagatatccagttggcgatttgatataaggatctggagacagaaaatttgaagtaaaagctgtggctttgaataacattgcccattcctcatttatgcattttcagagcctttttttgtagattctttgtagacagtgttgtctacaaatagaaacagcttcttcctttctgatgcctatgccttttatttcttgctttattgtattaactgtaactgccaatgtgatgttatgaataaattaaataggaatggtgacagtagacatctgtgccgtgctcctgattttaaggggaatacattcagccttttaccattaagtatgtcagttgtaagttttgctcatttgtttgtttcctttttccttttttttttttttttttttttgagacagagtctcactctgttgcccaggctggagtgcagttgtgtcatctcagctcactgcaacctttgcccccagggttctagcgattctcctgcctcagcctcctgagtagctgggattacaggcgcctgccaccacgcccggctaatttttttgtgtttttaatagagatggggtttctccatgttggccaggctggtctcgaactcctgacctcaggtgatccacctgccttggcctcccaaagtgctgggattacaggtgtgagccaccacgcctggcctgtttgtttcttttttttgagctggagtcttgctctgtcgcccaggctagaagtgcattggtgtgatctcggctcactgcaatttccacctcccagtttcaagcaattctccagcctcagcccccccagtagctgggattacaggtgtcggcaaccacacctggctaattttgtatttttagtagagatggggtttcaccatgttggccaggctggtctcgaactcctgagttcaggtgatctgctgccttggcttcccaaagtgctggaattacaagtgtgagccaccgtgcttggcctctagttttttttgtaggtgtcatctatcaggtcaagtaaattaattcccttctactcctagtctgctaagaatttttatcatgagtggatactgaattttgacaaatctttttctgcctttattaaaaaatcatacaatttttcttatttagcctgttgatatggtgaaattttcttttgtcttttttttttttttggatgtagagtctccctctgttgcccaggctggagtgcagtggtacgatcttagctcactgcaacctctgcctcctaggttcaagcaattctcatgcctcagcctcccgagtagctgggattacaggcatgcaccaccatgcccggctaatttttatatttttagaaatttatcaattgatttttttgtttgtttgtttgtttgagacagagtcttgctctatcctccaggctggagtgcagtggcatgatctcagctcaccacaacctccatctcccaggctcaagcaattctcctgcctcagcctcccgagtagctgggattacaggtgtgtgccaccatgcctggctaatttttgtatttttagtagagacagggtttcaccatgttggccaggctggtctcgaacttctgacctctggtaatgtacccgccttggcctcccaaagtgctgggattacaggcgtgagccactatgcccagcctatcaattgatttttaaatgttaagccagccttgcagttcaaggataaactccacggagttgtagtgtattaccctttttatatattgcgttcattttactaatattttgtgggagatttttgcatctctgtttatgggagatactggttttcttacaatgtctttaactgttgttgatgtcaggataatgctggcctgaactggaaaatgtttcctgtttgtagaagagattgtgttgaattgatatcatttcttacttaaatgtttggtagaatttgccagtgaggccatctggcctagaattttttttttttttttttatggaaaggttgtaaactacaaatttcagtttctttaatcactgtagaattattcaggttatatatttcttcttaagtgagcttgaaggaattggcataaagttattcataatattctcttattagccgtttaacatctgtaggttctgtattgacattagcactttcattgctggtattggtaatctatgtcatctttgtttttttcttggtcagtatcactaaaagtttatctattttattggtattttcaatacaatttggtttcatttattttagttttatttactttctaatataagcatatcatttaatttgattaatttattttgagacagagtcttgctctatcacccaggctggagtgcagtggtgcagtctgggaatcactgcagccttgaactcccaagctcaagtgatcctccctcctcagcctcccaagtttccgggactacatgtgcatgctgccacacccagctgagttctaaaattttttgtacagatgggatgtcactatgttgcccaggctggtcttgaactcctgtgctcaagtgatcctcccaccttgatctcccaaagtgctgggattacaggcatgagtcaccacactcaaccaagcatataattttatatatgatcctcccacctcggcctctcaaagtgccaaagtgctgggattacagacatgagctactgtgcctggcacctttgatattttctattagtataggtctgctgccaatgaattatcttagtttttcttcatttgagaatatctttagttttcccttcattaatgaaggatattttcattgatatctaattccgggtagacagtttgttttagcaatttaaagatattccacaccgggcacggtggctcacacctgtaaccccagaattttgggaggccgaggtgggtggaccacttgaggtcaagagttctagacaagcctggccaacatggtgaaaccccatctctactaaaaataagaaaattaggtgagcatggtagcatgcgcctgtaatcccagctactctggaggcagaggtgggagaattgcttgaacccaggatgcaatgagctgatatcgtgctactgcacttcagcctgggcgacagaacgagactccgtctcaatttaaaaaaaaaaaaagatattccactgtttctactcctcaaggtttctaataagaaatccacagtcactcaaatcaatgtatgtacaatacataccttgtaatgtatttttttctgcaggtatctctctctgtcatagtatctgaataatacccacccaaagatgtcaagttttaattcctgaaactcataaatattattttatttggaaaaagggtctttgctgatgtaattaaggattttgagaggagtcggttaccttggatttttcaggtgggtcctgaataccatcccaagtgtccttataagagagaggcaaaagaggcaatagagacacagaaaagaaagccatgtgaagatggagcagagagatatatggccacaagccaaggaatgctgacagctgccagaagctggaagaaggcaaggaatggactctcccctacagcctccagaggcaatgcagccctgccaacactttgattttagacttctggcctatagaactgagaaagaataaatttctgttcttttcagctactaagtttgtgatcacttggtgcagcatttacaggaaacaaatacacctctccttctagaactccaattatgtgaacattagaccatctaatattgccccacatgttcctgaggctctctgttcattttctttttaatctatttttctctgttcttcagattggacaattgctctcttttttgtttgtttgtttttttgagatggagtttcgctcttgtcgcccaggttggagtgcaacggcgcaatcttggctcattgcaacctccgcctcccgggttcaagtgattctcctgcctcagcctcctgagtagctggtattacaggcacccaccaccatgcccagctaatttttgtatttttagtagagacagggtttcttttttttttttttttggcagtttttacttttatttaaacagaaaacatgcacacgagctgtctactcattttctttgctgcgcagcctggcattggggttggtgactttgatggccagttgggcagctctttccacgatggctttgcggttcttggaggaaacatggtgagtgatctcggcacagtaagatttgttgcacatcagcagcacttccagctccttgacgttgtggaccaggaacttccggaagccactgggcaacatgtgctttgtttttatttttatatttttgcaacggagtcttactttgtgacccaggctggagtgcagtggtgtgattttggctcactgcaacctctgcctcctgggttcaagtgattttcctgactcagcttcccaagtagctgggattacaggcatgtgccaccactcctggctaagttttgcatttttagtagagacggggttttgctgtgttggtcagactggtctcaactcctaatgtcaggtgttctgcccgactctgtctcccaaagtgctaggattacaggcatgagccactgcacccggcctggctttgtttattactgtatctaatgcctaatatagttcttggcatatactaagtggccaataaatatttatggaataaacgaatgaatggacacttttcaaacctcatcctgcttgacatttttgcagcattctacgctataggttgttcccacctcctggaatctttcttccctaaactttcatattctactgatttccccacttctgtaggctttctttacaggcaagctgctacttctttatgaatcttacagcttcagatattgctgtgaaaatggggacacctatatagtcacccacatacgcacaagtacaaacttaagagaataataaatgctcagtcaccatttcctcatccgagaagggagtggatacagtcatcccttagtatctctagggaattggttccaggaccccatgtggacaccaaaatccatggatgctccggtcccttatatacaatgatgcagtatttgcatataatctatgcatacccatatgctttaaatcatcttagattacttaaaatatttaatacaaagcaattgttatataaatagtaattatactattattacttagggaataataaggaaaaaaagtctatacatgtttagttcagacacaaccatccttttatccactcccccagtttttttttttttttttgaggtggattctcactctgtcacaaggctggagtgcagtggcatgatctcagctcagtacaacttctgcctcccaggttcaagtgactgtcctgcctcagcctcccgagtagctgagattacaggtgtgtgccaccatgcccagctagtttttgtatttttagtagagactgggtttcaccatattggccaggctggtctcgaactcctgacctcaagtgatctgcccacctcggcctcccaaagtgagccacgatgcctggcctgcccctaaatattttcagtccttggttggctgaatccacagatgcagaaaccacagatgtggaacccatggatacaaagcactatttgtggccaggtgcggtgactcacacctgtaatcccaacactttgggaggccatggtgggaggattggttgagctcaggagtttgagagtggtctgggcaacatggtaaaagcccatctctactaaaaatacaaaaattagccgggcatggtggcacacacctgtggtcccagctactcaggaggctgaggcatgagaatcacttgaatccaggaggcaaaggttgcagtgagcccatattgcatcactgcacttcatcctgggcaacagagtgagaccctgtctcaaacaaaacaaaacaccaacaggctgagcacgggggctcacacctgtaatcccaacactttgggaggccgaggcaggtggattacttgagcccaggagtttgagaccagcctggccaacacggcaaaaccccatctctactaaaactacaaaaattagccgggtgtggtgacgcaagcctgtaatcccagctacttgggaggctgaggcagaagaattgcttaaacctgggaggtggagattgcagtgagccgagatcacgccactgcacttcagcctgggtgacagagtgagactccatctcaaaaaaaaaaaagggtgggggggaggatgagaaaactgggagatgatggatatgtaccattatcttgatagttgttttacgcaaatgtcaaaactcatcaaagtgtatacattaaatatgtgtaggttatcacacgtcaattatatatcaggaaagcaatttttaaatatcttcatttctgtgaagacaattcttttatcactactaggaatgtttcatggggtcaaggaggtcatagaaacaaatagaatggaagggtggtagaatagaaagggtgctaatgtacatcaatgaaacttcaatatgaaatatataggtccaaaatgctactcaagaaaaaaaacattatggcaatcacctgtttaagcttcctgattagttctcgaagttgagcttccacacgaaatgcagaaaataagcacctccaatgaatccagtgtttttggcaccatgaagctggagctccactgcaaaacaaaaaactggtatctttaaaatatcttctctaagtaaaagacaatctaaaattctcatttctattacaaaagtggaaacccataaacaactgtcagttccttcaggagacctgtccaagtactaaaaaagaattttaggaaacttgaaaaaaacatttaaattaatgaatgtgcccctgactaaattaaaaaataatttgtaaatggatttctttacttatatatgcaataacaaatatccaatcattttttaatctaggctacctatatagaagcaaaattctacaaggtcattttcagtaaaggtttgaggaggaaacaagagaatcaatgttatataataaatgcctactaagcaatagtcatctgacatagataatttcactgaaattcaaaataccttgaagtcaatatcatcttcactgaacgttagtgtcacaagccacatcataagtacgtattggaactacacatcaaattgacatttttcaggacaaaggactaccttacataccttgatttgcattgttcaaagatgacagctaaagttgcaaagtcattaaatcctccagctttagctgccaattctcgatgtctctgttctgcttccttctggtactctggatcaactaaaagaattggagaggcaattcagttatactttgcattaagtgcctacaatcactttgctttcagaaactcattaaaatctgcctcatcctctggggtgaagtaaggtagaactatattaactcttcttaacttctcttaggaagctctatttctcccacaattcctttttttcttttcatatcactttggagattttacctgaatagcaacatcacttctcccaatctatttgccttttaaaaatagtatttgtaatttactttttaaattagttttgttataagagtaatccatgcttacagaaaaaaaaatgtaatggtataaaagaatatcatgtaaaagttcaatgttccccagtcacactacccataaaccaatcctcaaggcaaagtactgttcattatttagtgtgtgtccttccaggtaatttctatgtatatataagcatatgtacataatgtttcatttttctataaatggaacatataatctgaaaatttgtttatttaataacaactccatatcagtacacataaaattattctctctcaaaaacagcaatatagggccaggtgtggtagctcacacctgtaatcccagcaatttcaaaggccaaggcaagtggatcaattgagcccaggaggtcaagacaagcctaggcaacaaagcaagatcctgtctctacaaaaaatacaaaaattagccaggcatggtgatgcatgcctgtagtcccagctactcaggaggctgaggtgggaagatcgcttgagcccaggaggtttgtttttttttttgagacggagtctcgctctatcgcccagacgagtgtagtgggcgatctcggctcactgcaagctccgcctcccgggttcacaccattctcctgcctcagcctcccgagtagctgggactacaggcgcccgccaccgcgcccggctaattttttgtatttttagtagagacggggtttcacatgttagccaggatggtctcgatctcctgaccttgtgatctgcccgtctcggcctcccaaagtgctgggattacaggcataagccaccgtgcccggcccaagcccaggaggttgaggctacagtgagccgtgatcgcatcactgcgctttggcctgggcaacagagtgaaaccttgtctaaagaaaaaaacaatgatacggtattccccaggagtatggggaacataacacaatttaaccagttcttatttatccaattcccaattatgggcaattagacatgatctccatatatgcagaactgacctactacgaacattttcttttttaatgtaatattgaagtataatatgcatacagaaaattacacaggacgtaagtgtgtagctcatataatattcacaaacacaacataccaatgtacccagatcaacaaacagtatcaccagcatctcaacagcccccttttatgccctccttcgagtaactacccattcccttccacaagaataactatatcctgacttctaatcctacagatgggttttgcccatttttaacctttgtataaatgaatcgtatagtatgtacttgatgtgtctgttttctcttgctcaacattacgtttttgagatttatctgttaattacttcgataccacttcccctgatcccattcaggactcatgtgctctctgattgcccaaattccccatacagcactttatccagggctaatctttcagagtgccattttttcaaaactgcatagggatcctttccttcaatctaacacgtcacatcacaattcctattccctatacctatcacagctagatctagcagaggcacaatgttgcctgaatccagggagcagcatttactatagaatacgatgtgaaactgcaaagcagcagttcctgttactaggaggaaagtaatttgattaaagaaaacactgatgaaggtataaagtcttctatcccatgctttaagtagcttccaactatgttacctaggtagcaactgaatgaagcagctagagacaaaaaaaaaaaaaagaatacgatttatctcagaccatacaaacatacaaatgaccctggtaaggaaaagatataaatgattattaatctccatttcttgaactgctccgggagactaattttgttttttgttttgttttttgagacagtctcgctctgctgcccaggctggagtgcagtggtgcaatcttggctcactgcaacatccacctcccaagttcaagtgactctcctgtctcagccttccaagtagctgggactacaggcacacaccaccacacccaaataatttttacattttttagtagagatggggtttcaccatgttggccaggttggccttgaactcctgacctcaggtgatctgcctgccctggcctcccagagtgctgggattacaggcttgagccaacacgccagccagggatactaatttttaacccaaaatatttcattttaagcacctaactgccatcccccagaagatatcatgccaaaagtcaaattgccctagactccagcatcgaccccatcctggctctcaataccaggagaaaagcctacctgtgagtcagtgcctcctggaatccctagaatcatggcaccatgcagtctgtgtttgcatgcatttttgataaattttaactttttataatagatttgtgtatattttatggtagtaaattataaaacagactagtactggaacaggaattaaaagaaattaaagactttataagcaaaaactcagttgtatgtaagaaaacccaattccccgaggaagagaaagagctggagtcctttaaaattaactgcctgtttttctctctgtggctagtgagccttatctcaccccttcccaggcattgtgaagactctcgagctgtgcagcttcaaggtcactagacagataatctcaagtcgtaaaacatgttgttccttgaaaagtaagaaataatgtaatgcacgtcttaattaaataactgtctttgtttctcacttctgtaatatgcttccccctgcacagatctccccccgccccacgaaatgcttaaaaggtagcttgactctttgttcagggctcagtcctttggatgttaatccaactgggttggtgcacctaaataattaaataactcctcctcaacccctcggtctctctgattccttaattatcctgcagcatttcctacacatagtttatgttttcatgacatactttttcttaatttttttggtatttccaggctacggagttcatctgtgagttttttcaaagtgtcacaaatctccaaaaacttttccaatatatttattgaaaaaaattggccgagtgcatggctcacgcctgtaatcccagcatgttgggaggccgaggcaggaggatcacctgaggttgggagttcgagaccagcctgaccaacatggagaaaccccatctctactaaaaatacaaaattagctgggcatggtggcacatgcctgtaatctcagctactcgggaggctgaggcaggagaattgcttgaatctgggaggtagaggttgcggtgagttgagattgtgccgctgcactccaacctgggcaacaagagcaaaattctgtctcaaaaaaaaaaaaaaaacaaaaaaacaaaaaatctacaaataagtagacctgcacagttcaaacctgtgtgttcaagggtcaactgtattgggaatggtgatgtgaggagttaggtaaaacttcttttctagagagacatctattaaactagtcaaaattaccaaagacaatcattcaaagtctctggagattgattaaaatgcttaagacaagcctaatctatggaattcggtaaggacagtaggaagaatgccccactctcaacagctgtgtgtgtggaagggctatgcgagagccttcaaggcagcctgaaagcggcaccctttccctgactcctaaatgctactcggtagggaagatcaaagcataacagctaatgacagcctacgctgtcctctattccccacagctctgtgttgcagaagagttgttccaatgggttcagcagctcagtggtagttcccactactcccagtttcctagagctattccaggtttgtatgtttgcaactagtgaacatccagagattgcatctcaaaaggctttgtgctgaggaagatgcaaagtgagccatagtatcagctcctaactccccaaccccaagcttctgctatttagggaggacccagataggagagccactgaagaacaggcccccattaccaccaccaccctctccaactcctgctccatagcacagagattgtttccaggaaaggatggggaaaggattatcaaagacgggcaataccttgcccctgccgaggtgcccaactttatttggatcaagactatggcgcaatttatgctctgggcactgtcaaaaacaacagagccagcagctagcaatcagtggagactaacagcttgctgtgacaccaatagagacagaccagccaaaaattcaatgaagaaatcaatgaaggaaacagagacctgctaagagcatagtcttcctggtgttctagaagattgttctcatgcccaaagctgtgccttctgagaagtaaatagagagggaacgtctgagcctctactccttggctgaacacagtacaaattcatcaactccctcaaccatgaaagtagtctcctaaccagaaacacagattcaacagtaaaaggtgaaaacatcactggcttaaattaaaaggcttagctaggtacaacctccgaccaatcactgactgaccgctggagttgacaaggacaagaaacaaaatggaaactgccatagaggggctcaacagtagatctgggctggcagaagaaagaatccacgaattaaagtttttttttttttttttgttttaatttaagacaaggggccgggcatggtggctcactcctgtaatcccagcactttgggaggccaaggtgggcggatcacctgaggtcaggaggtcaggagtttgagaccagcctccaacatggcaaaacctcgtctctactaaaattacaaaaattagccaggcatggtgatgcaagcctgtaatcctagctacttgtgaggctgaggaaggagaattgcttgaatccaggaggtggaggttgcagtgagccaaaatcatgccactgcactccagcctgggcgacagagcaagactccgtctcaaaaataaaaagacatgggcaaaatattttaaaagacatcacaaaggaagacagaaaaatggccaataagcacatgaagaagtgctcaacattattagtcatcaggaaaatgcaaattaaaaccacaaagaggtacataatagaatgtgtaaaataaaatgattggcaataccaaatgttgagaggggtgtttagtgcaagctgtactctcaaacattgctgatgtgatttttaaatggtacaactgttcagggaaaaggtttggcagtttcttaaagattcacatatacctactcgatggcacagcaaatttctttcttaggcatttaccttatctaagaaaaatgaaaataaacaccttcaaatttttgtgcaagaatgttcaaaacaactttactcaaaaatagaactaaacaagaagcaattcaaatgtccatcaacaggataatgcacaactgtatgttcataaagtggaatactagtcaacaataaaaagaataaagtattcatacatacaacaatatgaataaaccttaacatacattatgttgactgaaagaagccagacacaagaaaggagagtgtataattctatttatatgaagttttgggctgggcacaatggctcacacctgtaatcccagcactttggaaggctgaggccgacgctgatggatcacctgaggttatgggttcgagaccagcctggccaacatggcaaaaccccgtctctactgaaaatacaaaaattagctaggcatggtgtcggggacctctaatcccagctactccagaggctgaggcaggacaactgcttgaacccaggaagtgaaggttgcagtgagccgagattgtgccactgcactccaccctggatgacagagcaagactctgtctcaaaagaaaaaaaaaattctatttatatgacgtttcagaagaggcaaactaatcagaaaaaaataagaaaagtgtttaaccaaaggtaggtagagtgatatctgactaagaagtggcactgagggaacttgctagtgataaaaatgttctatatattgacagggcttgggttacatgggtataagcattttacagaattcattgaattatacacctaaaatttatgcatttcactatatgtaaattttacctaaaattaactgtaaacaaatatcaaactgtagttatatagggttgtttttcacagtactataacttaccaattctcaaactactttctgtagattctagggaaaatggacaatttcaatatggattctggattagatagtaatattgtatcaaagttaaatttccaaactttaggccgggcatagtggcttacacctgtaaacccagcactttgggagaccaaagcaggaggattgcttgagcctaggagtttgagactaacctgggcaacatggggagacctcatctctacaaaaaatttttaaaaattagtcaggcatggtagcatatgcatgtggtcccagctactaaggaggctgaagtggaagaattgcttgagcccgggaggtcaaggctgcagtgagccatgatcccaccactgcactaactgcctgggcaacagagtgagactctctctcaaacaaaacaaaacaatttcctaattttgattaatgtactatggttaaatgagagattgcccttgttcttgcctaatacagatgtaaatattttgtggtaagggagcacaatgcttccaatttattcttaaatgattcagaaaaagaaaaaaatctgtttatatatacatatatagagggagacagagtaataaagcaaagggggtaaaatgttaaaaattgcggaaactgcatagaaggtataaaggaattcctttgctattcttatttgaaattatataagaataaatgtcacccaaaaaaggctaacaccacactgattttatctatttaaatattccaacatggaaaaaacatttttctttttctagccttaaaagactattagagttggtcaccttaatccaacttcttggttttacaaatgaaaaatgaaatctagaaaagctagggccatggtcagataattaggtagtagtggagctggacagaaccctgcactcttaactcctacttcaatactctgtaataggttttgaaatattttagcttgtttatttctttctttcttttttctttttggggatggagtctcactctgtcacccaggctggagtgcagtggcacgatctcagctcactgcaacctccgcctcctggattcaagcaattctcctgcctcagcctccccagtagctggcaacacaggtgcacgccacgcctggctaatttttatatttttagtagagacagggtttcaccatgtcggccaggctggtctcaaactcctgacctcaggtgacccacctgcctcagcctcccaaagtgctgggattacaagtgtgagccaccacacctggcctattttttaatttcttatcagagatggggtcttgctatgttgcccaggctggccctgatctcgtgggctcaagcaatcatcccacctcagtctcccaaggagctgggataccactgtgcccactggtatttttagctctgatactgcctcatgaaaaccagttaacattacttatttttatacagcattttattagaacaaaaaattgcaattaggggtattactagaattaaaattctgacacttcagactgcaactgctgggtgcaatggctcaggcctgtaatcccagcattttaagaggccaaggctggtgggtcacttgagctcaggagttcgagaccagcctgggcaacagagtgaaaccccatctctataaaaatacaaaaaattagccaggcatagtagcaagcatctgtggtcccagctgctggggaggctgaggtatgggaggatcacttgagcctgggaggcagaggttgcaatgagccaagatcacgccactgcactccagcctgggcaacacagtgagaccttgtctcaataaaatttaaaaattttttaaattaaaaaaaaaaagactgcaaactatttgaaacagtatattgattagagtatttttatagaaaaatgtatcctccattataatcatggcaataataaattaatctggacccgacacttccagcctacaaaggtataaagccagtgagctaacccattctgttgtctggctgcagacaaggtatactgttcacttggaagctccttgaaagaaaaaattactccactgcatgaaaacaaatctaacatatgtcaaattaaattgtgtcctatactgacacaccaagaaaagaaagaagcagaagtttaaagacctggaaacttcaaaagaattctctaaggatgcaagggctaaactaccttttcttttgatcctacaaaaaaaaaattagtaaattactaacgtactataaaagcactatcttcctttactaatgaaaggaaattaacgccgggctgggcgtggtggctcatgcctgcaatcccaaggccgaggtaggcagatcacctgaggtcaggagttccagaccagcctgaccaacgtggtgaaaccccatctctactaaaaatacaaaaattagccaggcgtggtggcccatgcctgtaatcccagctacctgggaggctgaggcagaagaatcgcttgaacctgggaggaggaggttgcagtgagtccagatcacaccattgcactccagcctgggcaacaagagtgaaactccatctcaaaaacaacaacaacaaaacttgtttatccttagttttctgtcctagggctaaggcacggtaaaccctcagtaaatgctcaatgaattactggcaatctaaataaatgaagagatattccatgtacatggataggaagacaatactgtcaagatgtcatttcttcgcaacttaatctatcttaattaaaacataatcccaattaaaatcccagcaagggccgggcgcggtggctcacgcctgtaatcccagcactttgggaggctgaggcgggtggatcacaaggtcaggagattgagaccatcctggctaacacagtgaaaccctgtctctactaaaaatgcaaaaaattagccgggcgttgtggcaggcgcctgtagtcccagctactcgggaggctgaggcgagagaacggcacgaatctgggaggcagagcttgtagtgagccgagatcaggccactgcactccagcccgggtgacagagcaagactccatctcaaaaaaaaaaaaaaaaaaatcccagcaagttcagcaagttattttgtggatttcaacagactggttctaaagtttatatgaaaaagacccagaatggcctaaacaattttgaagaggaagaacaaaacttcaagagttactataaagctccaataaccaggacagtgtggtattggtggaagaacagacaatcagataaatggaacaagatacagagcccagaaacagacccatataagaatagtcagctgatatttaacaaagaagcgaaggcatttcaacagaaaaaggacagtgttttgaacaaatggtaccgcaacaactgtgcgtccaaatactaaaagacaatagaagagaaaatctagatgactttgggtacgacaatgacttttttagatacaacaataaagacacaatctatgaaagaaataattgataaggtagacttcgtcaaaaataaaaacttctgctctgcaaaagtcaatgtcaaaacaattagaagataaaccacagactgggagaaaatatttacaaaagatctatctgttaaataactatttaaaatatgcaaagacctcttaacaataagaaaacaacccggctgggcgtgctggctcacgcctgtaatcccagcactttgggaggccaaggcgggcagatgacctgaggccaggagttcgagaccagcctggccaacatggagaaaccgcgcctctactaaaaatacagaattagccaggcgtggtggcacatgcctataatcccagctaaaaccatataacacaaagagtgatccctttagttaataataatgtgtcaatattggctcaccaattgcaacttatatgtcatacaaatcaaagatgttaataggagaaattgctgtgggaggttgaggggatgaatgtcaaccctctgtactttctactcaatttttctgtaaacttaaaaatgctctaaaaaataaagtctattaattttttttttggtgttttttttttttttttttagtagagatggggttttaccatgttggtaaggctggtcttccaacttctgacctcaagcaatccacctgccttgccctcccaaagtgctgggattacaggcgtgagccaccgtgcccagccaagtctattagttttaaaaaacacaacttaaaataaacatcttaccaggtctaatgaagacgttttccacagacaacattgctgctattggaagtagtaaatcttcacaatccagggaagcagcttttattactgcacatgtcagatgtggaggcaaaggaaactccaccatagacaaacccaatctggtgacatggccactccttaatacaaagaaaaagtttgtaagtctttctacactaggagagtacaaatgtaacattcatcattcagaataaatcagatataatttacattacctccaatcacctccagaagttcaattcaatttaagaaaattaggccaggcgtggtggctcatgcctgtaatcctagcactttgggaagctgaggcaggtggatcacctgaggtcaggagttcaagacctgcctggccaacatggcaaaaccccgtttccactgaaaacacaaaaattagctgggtgtggtggcatgcgcctgtagtccctgctacttgggaggctgaggcaggagaatcactcaaacccgggaggcaaaggttgcaaagctactaaggaggctgagggggattacacctgtaatcccagcactttgggaggccgaggcaggtagatcacttcaggtcaggagtttgagaccagcctgaccaacatggtgaaaccctatctctaccaaaatataaaaaaattacctgggcatggtggtgcatgcctataatcccagctacctgggaggctgaggcaggagaattgcttgaacctgggaggtggagattgcagtgaggtgagattgcaccattgtactccagtctgggcaacaagagtaaaactccgtctcaaaaaaaaaaaaaggaagatgtctttgaagacatgagagaataataattttattttttaaattttacctttttttttttttttggagacagggtcttgctccgtctcccaggctggagtgcaatggcgcaatctcctcagctcactgcacccctcacctccgaagctcagacgatcctcccacctcagcttcccgagtagctgggactactggcgtgtgccaacaccattggctaatttttgtattttcagtagagatgggttttactatgtttcccaggcttgtctcgaacaactgggcccaagcaatctgctcgccttggcctcccaaagtgctggaattaccggcgtgagccaccacgcacatccaagagaataataattattaatatcaaacctaaccaccccatcacacaaacatgaaaacaaggactctggctctcttatcatttttatgtatccagcataatgcttggcactgaaatggtactcagaaattacttgttaaataataccaatatttattaaacaaaagggattatatcgtgtagtttctttctccttttttttttttttcagatagagtttcgctctgttgcccaggctggagtgcagtggcatgatcttggctcactgcaagctctgcctcccaggatcacaccattctcctgcctcagcctcctgagtagctgggactacaggcgcccaccaccacgcccagctaattttgtttttgtatttttagtagagacggggcttcaccatgttagccaggatggtctcgatctcctgacctcatgatccaccgacctcggcctcccaaagtgctgggattacaggcatgagccacagcgcccggctggtttttcaatcagaattgtgatgaaagactaacaatccattcaatttaaagaaattattttctactgttagagaaaggtatttagagccctgtttaaaaggagatcaatatctgttttgattgtgatttttttttttttttacctgtcaatagcatcacactggtaaagctgtttaagagcttctaaaataagtctctcattaggtggatccaaatagggaaacctgtgtgtttaaataagatatgaagtgagaggcattccttgaacatggtaggattttatatagatatgacgaaaatttctttaaaaggttttatttctatttttcaagtcatctttttctaaaaaaaaattatatgatcatgatcagcatttggcaaaagaggaaataatttttttctgaatcacactcctctacttcaagaagtgattctttttgactccccttagctgaaatactctcaccagtctacttatcctaatcctgccccacccatccttcacagcctatgtcaagtctactcttttctgcagtccataatttttttccaaacttttataaaaatagtagagaaatattaatagtagagaagtattaatagtagagaaatattaattagtactgaaaattataaattgttcaatagtacctcaaaatgcttttttttggagatggagtctcactctgttgcccaggctggagtgcaatggcacgatctctgatcactgcaacctccatctcccaggttcaagcaattctcctgcctcagcctcccgagtagctgggactacaggcacatgccaccacgcctagctaattttttgtattttagtagagacagggtttcaccatgttgcccaggctggtcttgaactcctgtgcttaagcaatccgcccacctcggcctcccaaagtgctaggattacaggcgtgagccaccgcacccagcctcaaaatgcttcttaaattcaatttaatttttttttttttttgagacggagtctcactctgctgcccaggttggagtgcagtgtggcaatctcggctcactacaacctccgtctcctgggttcaagtgattctcctgcctcagcctgctgagtagctgggattacaggcacctgccaccatgcccagataatttttgtatttttagtagaggcggggtttcaccatattggtcaggcttgtctcaaactcctgacctcaggtgatccacccacttcagcctcccaaagtgctgggattacgggcgtaagccaccgcacccggccggacaaaatgctttcatataaatggggaaatatattcaattaatttagccatatttgtgtcacatatgtgtacatgtgtatgtacttattttctgccaaactatctcagaataagttgcaaatacaatgccattgcacacttacaactatctcggcatgcatctcctgaaaataaggacattctcttacatcaccataatgcgctattaataaatataataaaattaacaattaacaataatattcaaaagggatagcatcatcaaacatgaatatatattttttaaaaacaggaaaaataattacttgatatcatctgcactgggttattttttccaccttaaatctggatatgaaaaatcatctactccaacttctcaccttgaaaaaaatccaatagaagacaaaaggtccaataccttatataaaatgtccattccaggattgataaccctatttaaaaataaataaataaaacaaggccaaggatggtagctcacgcctataatttcagcactctgggaggctgaggcaggaggactgcttgagctcaggagtttgacaacagcctaggcaacacagcaagatcccatctcttataaaaagaaaaaataataagcaaacaataatctcttacactgttctactgccagctttcctacaatttgtaccaataggtcctggtagcttctacagcaagaattggtaaacattttccgtaaagggccagatagtaaatagcttaggcttgcaggccatatggtctctgtcacaattactcaaccatgctattacagtgaaagcagccacacataaacaaatgggtatggctgcattctaacattttatttacaaaaacagtcagtgagattagaccacagtttgccacccttgtgctagagcaataccaaaccagtcagctgcttcttctatataaaaggaaaaactacttattctaaaatattgcaattaatttccccccttgattcctccaattaccaattctgtcaaccactccttataagttacttggtttctaagagatctaccatacctaagtaccattctctaaaaacactagtatgtcaaactcctcataaaacttgattatatccaaaactgaactccaaatgttgagtgaccaacacataacaggaatgctgtaattccccatcacctagtttattaatgtaaccaaagtctatgccagtggaattaaaaaaaaaatttttttttttgagacagagtcttgctctgtcgcccaggctggagtgcagtggtgcgatctgggctcactgcaagctccgcctcccgggttcacgccattctcctgcctcagtctcccgagtagctgggactacaggcgtctgccaccacacccagctaattttttgtatttttagtagagacggggtttcactgtgttagccaggatgatctccatctcctgacctcgcaatccgcccactgtggcctcccaaagtgctgggattacaggcgtgagccaccgcacccggcctaaaaaaaaattttttaaacagagccatacgtataagccaatattaaggttgtgatgatctgataatttcagatctctaccacatgtatttgctattgtacatcccaaacacaggatataagatatatcctttcaaatttacaccctgttgatttttgcccatggttctaatctgttaaagtcattttaaagcttggtcatctacctattagatattaagatattttccagaaaaatataatcataacttcaatatttttattcagtatcattaaaaatgtttatcaagaaaaaactaagttcagcacaataccagtaaaaacttcatctagtctacactaagcaattaattaatacttttctagactgggctatctggcaactatactcagcagtactgtcatctacagactacttttttattcacaagatatcaaatgcagtattgttaaatactgtgctgaaaataaaagacattaggttaaatttcaataaattcttgtggagcacccattatgtggacggtcctgtcctcaaactgaaaaggaaatggcttataatgacatatttggccgggcatggtggcacacgcatgtaatcccagctactcagaaggctgagacacgagaatcgcttgaacctgggaggtggaggttgcagtgagctgagattgtgccactgcactccagcccgggtgacagagtgagatcctgcctcagaaaaccaaaaccaaacacaacaacaacaaaaaatgacatattcattgtgaacttttaaaattcatactcattaatcgtcattaaatttccttaaaccatttttcaataaactgtactagagttcgctagtaatcaatgtcaagcttactgggtagttgtttccagaacccgccctttttaccaaatgaaaaaaattaagacttttgcctttctcaccattttctgataacgtattctgcataatttctcatagatgacctacagtgactctgacgctaaatctgcaagttcttttaacaccacggaaataatgtctaaatgctcaagacaaaatcacttatggtggtaggttttccctcattatttccttccaccttagtcatcaattccttcttattcagacctgttcttgcattttcagctttaaaattattcttcctgatggaaaagaaagggaaagcaaaataataattgagaaggtccattttctttctgtcgtctatgaatcctataccatctaccccaaacactggctctacctctccttattctttatacaactttttaaaaaggaagtctttgttttttgtttcaagcattttgaaacaaaattttgcgatttttagtacactatggcttttaagacttaagatggaaaaataattcaatgcagatgatattaattattgttcctatttttctaatatatactcattcttggttagaggctgctctgctatcctttgtgaatatactaagagtcaatgtcaaacttactgagcagctatttccaaaaatggccctttttccccaaatgaaaaaaatcaagacattattttaatatctgggttcatctgaaagttttctattgggctctttggatttctttaaatggcgctttccttcttttcattggtataatttattgctacagtcagaatttcatttattacatgcttttctctttccagtatctacatattctcattcagaaaatctctagtctaatgataactatcaaaacattttgaaattggcaaattggctttccaagagtatacaatgagtatttgtgggttttggggttttttttgctttttttggttgttttttttttggagacagagtttcgctcttgttgcccaggctggagtgcgatggcgcaatctcggctcactgcaacctctgcctcccgggttcaagtaattctcctgcctcaggctttcaagtagctgggatcacagacgagcaccaccatcctggctaattttgtatttttaatagagacagggttacaccatgttggccaggttgacctcaggtgatccacccgtctcggcctcccaaagtgctgggattacaggcgtgagccaccgcacccggcctacaatacatatttggatgcacctaataatcacttactatgaatttaaaaactgcacggttaccatcccccaaaattcctgagcagttttacattccaaggcaattaagaccaaaataaagaagatagtactttcctccattaattcccctaccatgtatgatagaaatttctatctataacaatattctatcttataccaataaattatattaatatttggctaatttaactgttcttcctttatttcacgtgtctgaaccttgttttcctaatataacttaagcttagtgaaagcaaaaaactacagagtattactctgtctttcatggtatatagtatgatgctggccatacaaaaaaaacactccactttccaactgtatacccttttgttttgttttgtttttttgagacagaatctcgctctgttgaccaggctggagtgcagtggtgtgatcttggcacgttgcagtctctgcctcctgggttcaagtgattctcgtgcttcagcctccggagtagctgggactacaatcacgtgccaccaagctcagctaatttttatattttcagtagctacagggttttgccaggatggccaggcgggtctcaaactcctggcctcaagggatccgcccactttggcctcccaaagtgctaggattacagacgtgagccaccacgcccagcccccttcttttgaaacagggtctcactctgttgcccaggctggactgcagtggtgcaatcatggctcactgcagcctctacctgcccggctccagcaatcttcccgtctcagcctccaaatatctgggactcaagcatgcaccatatcagacttttttttttttttaattgtagagacaaggtctcactatgttgcccaggcttgtctcgaaatcctaggctcaagcaaccctcccaccttggccatccaaagtgctgagattacaggcataagctgttatgcccagctcattatatacctttcattacaaataaacagtggtcactaagtgatccacataaacatcagcacaaccccctaaccccgccattaagccaaggttaaacatgagcaagagatcctactaaagcaatgcaaggaagtcttctgtgttagtttagttgaaaagcaaccaatagagccaggcacagtggctcacacctgtaatcccagcattttgggaggccgaggtgggtggatcgcctgaggtcaggagttcgagaccagcctgaccaacaaggtgaaactccatctctactaaaaatacaaaaattagctgggcatggtggcaggtacctgtagtcccagctactcgggaggctgagacaggagaattgcttgaacccgggaggcggaggttgcagtgagccgtgatcgtgccactgctctccagcctgggcaacggaacaagactccatctcaaaaaaaaaaaaaaaaaaaaaaaaagaaaagaaaagcaaccaatataaaaaccaacctgtaaaagaggttagcctcaactctcagggatgtatcagtcaaatatttcaaaataatttttgagccaataacttggttccaggctaacaagtttttccttttttttctagttgtctacataccttatgacatcgtgtatggcaaggcactttaaggtcagaactacagatgtcaaactagttctcttaatttcagggatcacatggtcaggcatacactggttccaaaaatctttactatagatccgaaagcattttcctgaagaagtcctgccagctcggccacttcgctgtaatgcctcgctcctacaaaaggaaaaaaacccaaaaattccccaaaatgttctgtgggtttctcaggtaatttactttgtctccccaaaacagctagaaattacctaatcagttgttctttgaataaaaagatttgacatagagacttactttgaaattggaaccacctccaggatgtccaaccctaatctggggttgtgatttaactgcttcacaaagccaccatctaccacatatctaagaagaatcaaagcaagttaagtttctggaaaataaaagaagacttgttaattgttaaccactttggtttctccttttctagcaaactagcaggtacacaatgccttttatgttaagtgtaaaacttgaaagtcaagaaattggaaccctcgtatgttgttggtgggaatgtaaaatggttcagccgaggtggaaaattgttcggaggtcctcaagaagttaaacacaaaattaccatatgatccagcaattccatttctaagtgtacaccaaaaagaactgagaacaagtactcaaacaaatacttatagaccaatgttcatatcagcactatgaatcacagccataaggtaaaaacaacctaaatgtccattaaccattaatggaagaagggatgaacaaattgctttgcatatatgtatgtagtatatatacacacgcatatatacacacacaatggaatatatatatatatacacacacacactatgcaatattattcagccacaaaaaagaatgaagtactgatacatgctacaatgtggacgaacctcaaaaatattatgctaagtgaaagaaagcaaacacagaaggccacatattatatgattctatttgtatgaaatatccagaatagaaaatacctactgcttcctgctgacacatctaaagaattttttaaaaaagaaaatacgtacaaacaaaaagtaagactggtagttgccaagggctggggtcgagaggggaatgtggagtacctgcttaatgggtatggggttttattttgaggtgttgaaatattttagaactaagcagaagcagtggttgcgcaatactgtaaatgtactaagtactacttaatttttcattttaaatgattaattttatgtgaattttgcctcaatacaaaaatacacaaacttgaaagtcagcttcagaccatttaaacagattcagaatctaatttcaactagcccttaacatgccattctaagccaattaaatggtgaacaagtcaggtaaggaaccaaagtaggatagcagtaacaagacaacattctgaaacatgctatttaatggcttttgcctgtgcaggaaacagaaaattacagaggttaatttacccaggagagcactcccttaatcccttagtgaaaccattatttttaaagtaacgaagaaaagcagaggaaattagacttcctctcagacctgggtgatcattttacccagaagaaacacacaggatctttgagattcaggttcagccttccggagacagacaatcagacttagctaaagaaataaaatatattcggtaaatgataaataacccagtcttaaagaactttgcattagttgtcagtccagacttaaaatttctttgtgtttccttactaaatttacccaaaaatttgatagcactatttactacatccagaaaagataagggacctgaatcatagttaattttcacaaaaaggtaaaaagtcagagacaatacatccagataaacattggatatacaaactctaccgagtgaggctgcaaggtagaaggaaatatcaaatcatctaaggtatatgcttataatgggagtacagaaaaataggtttggcttcctatttagtgaaacccataaagcattatacataatcttaaatttgaaaagaagcttcaagttgccaagtagttaaaaagtgtgaacagccaagtatggtgacacatgcctgtggtcccagctacccaggagactgaggcgggaggattggctgatctccatacaaggctgtagtgtgctatgactgcacgcctgtgaatagtcactatattccagcctcagcaacataatgagaccctgtctctaaaaaaacaaaaagtgtgaataggaatatagtatgtacctcctactccatttcctgctcaaagcaatcaataattacaaaacaaaataggtgattacatgttaagaacatcaaaaagtaggagagaagggaattagtggagggcacagaaaagcaaactcagtaatgtttagctaatgtttagtaacgataggcttccttgactttaagagaaagttcaaaagttttacctggttccatctattgtcaaagacgttgcagaaatattggtggatatgacacattttctaattccaggtggcggtggcaaaaatatcctcctctgttgatctaaagtatatataaaaagaaaataccaatttacaacatgcatgtgtcaaactcgagttttgaagaactcaatttttcattacaagtcatgtttctaggccgggcgtggtggctcacgcctgtaatcccagcactttgggaggctgaggcgggaggatcacaaggtcaggatatcgagaccatcctggctaacatggtgagaccctgtctctaagaaaaatacaaaaaattagcagggcgtgggggcgcgcgcctgtagtcccagctactcgggaggctgaggcaggagaattgcttgaatctgggaggcagaggttgcagtgagccaagatcgcgccactgcactccagcctgggcgacagagcgagactccatctcaaaaaaacaaaaaaaaaaaaacagaggcaacagaaaatccagaacattattttcaatgtagcagtaagaaagaatgaaattatttactctgtatagaaaaatatatgtctatgtacatatttagttaatgattaataacaaaccaaacataatgggtttttatcagtttcaatgtaaattataaaagcatcagtgaaccaaatcttgagaaaacaatgagaaccttaaacaatgatcctaagaatttccctgaagatgacaaaatctaaaatagatatctatgctttaatagagagtaagaagctaatatcatcataaaaaagatttccaaaatagcacatctatgttctttactgacacatatattccaaaactttgttaatatagggataagaatcacccaatcaacaaaagctgttaatacacatacatgtaaaatataaaaacattcaaatgctaattccaactccaaataggaggctaaggttaatttccctttaactttacaagttaaattccataataaaagttttataaaacaaattctaaacctcattcaacaatatttactataaccaaaatgtcaaatcaagagtttgcatttgctcttggaattcaccaaagaacaggatcattcttgaaaagcagactaaggcatggctactttaaaaggaaaatgatccacagccaggcatggtggctcacatctgtaatcccagcaattctggaggccaaggcaggcagatgacctgaggtcaggagtttgaaaccagcctggccaacatggcaaaatcccatctctgctaaaaaaaaaaaaaaaaatacaaaacttagccaggtgtggtggcgagcgcctgcaatcccagctacttgggaggctgaggaaggagaatcgcttgaacccaggaggtggcggttgcagtgggctgagattgcgccactgcactccagcctggatgacaagaacgagactccatcacaaaaaaaaaagaaaacaatccactgtgtttagacttagatatagctggatatacacaatttctaaaaattctgtggcaatggcaaattaggttttgacttacagtaataccagcaagaaactactgtcctcatttcaaagaattctcaccaatagttttgttttgctgggagaaacaatactctaaacgataataagggggatatccacgactctcaaaaaagtgaatgtaaaaagacttcaggcaaaaatcactactgtcaaggaatgctggttctcactgatttgtttcatgatctggatgtgggttacaaaggtgagactggtttgtgaaacttacctaagcacttaagatctgactgcttttctgtaaacacgattattcaataaaaagttttttaaaaaaatcaaattttctattctaatgagaaattaccagttgtcattgatccataacacggcaatattaacaagccatcgaggatggtatcttgaacatcataatcataatcaacagactctgccatctgaaaaagtaactcacaacttttttctatttcaaactggcctaaaatgggaagaaaaaaataacttcagcaactgaacagaaaaattaatttaaaaataaagaaaatgtcaagattaaaattaattttgcctaaaagttattgtaaatctctcatttaatgtaaaggagatgaacacataagctgtaccatatttcaacaataaaattcgaagtagaagaaacatcagtttctaagaaacttaaatctctaaaggaataaaaatatttatcatcgtcaagcttttcaccctgtatttgagaagactcaccaaattgttaacaaaggagaaaagctagtccaggtgctattgcatttggttaaatttcaaaatacttaagtaatctccaaaaaggcaaagattgtgacaatcccttacttctgacattagtacaaggcagaggaaaaaggtaaacaaggaaactactaattcctattaggagggtgctgctacttgaaaagttatgccactagtttgggatttaactattttatttttgatctccaaaaatgccacatgcttgtctacgacacatagattctacaccttatgtgttgttatcacacagtacaatgccaccacccaaagaagaacctggtgaaatgtcctttgaaataatggaattaactcaggtctgtttagtcaggtttcatttctatctaagacagaccaacaaaaaacaatatttcactatttaatttctttctattaaaaggtcagtgtgttttacatatatttactaatgagcctgatgtctttgacatttgacatatatgtgtgtgtatatatacatatacactattacgtctttgacatatactactatgtctttgacataaaatatatatacatactattatgtctttgacataaatatatataatcctctttggcagctagcttacaatttttatctatcttttacctaaaattattcagataatcagaaaaagctagggcaacacttgagaagggcacagaattcccaacagaggtagcactctatctgggtgccacattccttacttacaaatacttaagttttttaacttgatactgaatgctcaccagtcagaaaaaccaagatgtctccagccatttcattcaaatggatatccatggtgactttcacaatctaaagcaagaaatgcaggcataatatgctagtggaaatacagtcattcccttaccaccacttcccttgccccacagaaaaattaaatttggttcttaaaagttctaggacctgtgaggactgtcattaaaatagtagtgaacaaatgaattatcaaaccacccaattagtaagaatcatagatatttaaaaaagacattaaatgaatgccaagtaataccgcttgaatatacgcagtattttctctgtctcgtggaccaatcaaattgcagaatttctctctgactggataaagccttccaggtatatcaaatattggacaatttccaaagaatgcagagagcttggctaattccatagttgctgacattaccaccacttttaaatgctccttcctattagcagacttctcctgaaatagcttcttcaatagaccaaataagatatcctgaaagaaaagtaaatttctagtaagtcacaagcacacttaacagccaaactattctaaatacgctgctgttctaaccaaggaattcctattttaatacattaaaatataagtaggagccaggtgcggtggctcacacctgtaatcccagcactttgggaggccaaggtcggaggccaggaggttgagacctgccagggaaacaaaacgagacactgtctctacaaaaaatattcttaaaaattagccagacatggtgatgcacgtctgcagtaccagcaactcaggaggttgaggtgggaggatcacttgagcccaggagttcaagggtgcagtgagctatgatcgtgccactgctctccagcctgggtgatggagcaagactccatctctaaaaaattaaattaaattaaaaagtaagaggaggcaattctctacacaataaaaagctacccaaacaaactacttgctaataaaaaataataataaattaaaatactcactgtagttagagttctttcatgggcttcatccaaaataatgactctgaatttggtaagacttgggtctcccagaatatgtttcagtaaacatccatcagtcatatatttgattgctgtctcctaatgttcaaacagcagtgtcacaggaattcaccactattttcccaactaaatttttcctcaagaggtacaaacattaagtgatcaaaccaatctgactaaacaaaagggtacataaaaatagtctaacttatgtatacaaaatgatggtaagttacaaaacatgctgtctatacagaaaaacggacaaataactcacttgggtattcttggacaaagcaacaaaaatcaccaagtccagaaggatagacagaattgaatggaaatgaacccttcataatctaacttcatcttgcctttccaacacattgtacaatacaaaattattagaatagataaaagcagtctatggccataccaacctgaacatgccgatctcatctgatctcagaataaaaacaaattagaaaagaagcttagtgcagtggctcacgcctgtaatcccaacactttgggaggttgcggtgggtggatctcttgagctcaggagttcaagaccagccggggcaacatagcaaaaccccgtctctacaaaaaaacacaaaaattagcagggcatagtggtgcacacctgtagtcccagctgctagggaagctgaagtaggaggatggcttgaccctggggagttgaggctgcagtgagcagtaaatgtgccactgcactccagcctgggtggcataaaaaagtcattccagataagagaaatcacagaaatatgaaataagaagagcatactaattagcccacttaatgcttgttgtagagaagtggttaaatattttacataggaatacacatgtcaaattatataaattacatgggagaaaaaacgctccaaaaattacatggaattttgacatgactttccaatgtaccctattcatacccactactcatttgctatttgagagaaatgtctcagaaccagtcaaaccaaggcttaccttcaaaaccaggtgggcacccaaattataacaagaattagaactttgtgcttgtccttgcatataaggctgtgtttcatttttccttcatatttactactgattgcttcatgaattcagataatttcagagccaggaggcattatttataacccaaattttaaatgtttatattcctgaaacatttgaatatttgcataaatgtcatgagacaaacaaaatttactctgtagaaagcacaatttaccagattattactgctagttttattctgtcagctttctcctttaaggagaaagcacagcactaggtagtcccatttattacatcaacattttaataaggccaggcactgtagcccacacctgtaatcccagcactttgagaggtcaaggccagaagattgcctgagttcaggagttcaagaccagcctgggaaacaacagtgagattcccgtcactacaacaaaataaaaaaattagccaggtgtggtccgcacatctggagtcccagacacttgggaggctgagatggaaggattgcatgagcgcaggaagtagaggctgcagtgagccatgatcgcacaactgcactccagctagggtgacagagggagaccctgtctcaaaaaaaaaaaaaaaaggtcttcatctgtcccttggactatttgcctcctactcctccaattcgttctttatatttccaatagaataatctttgaaatgcacctctagtcatttcactcaggtgctcttcttcagtggaaggtatgtatgccctatggtttgaagtcagtcgtttcagcatggcaagccctagtagtttctatgatttggtccctgtctgaacactgtgtacccttgcaaatgttgctttctagatcttgaaatgttctgcttctccacaggttccccctcttatctctcctattacttacgtaaactgtacaaatcttactacatagcttgactgaatttttagggatgcatccaaggaattatcctgcaaaattaagatacagaacatttccagcaccccagtaggctctcttctgttctctcccagtcgatactgaccctcagaggtcaccactattctgtcaccataaattagttttgcctattttggaacctcatatatacagtaatgcagtatttacttttttcgtgtgtatgtgtgcatggtgaactcatttttaagaccaaattttatgcatcttctctgtgaagcaaaaccctgtctgttccacacagacttagagtggcagaggagtaccttaacctatcaaaggctattttgagcaaaagccactttttgtcattgaagctgtagaactgagccacaagagggaactgttaaagtcccagggtcaaggaccaggtacttacgttatccccacagcgcagaagcacagcctgagtctcttctttggctgagccaagggtgtgctggagaggcctgagagaaggagcggcccttgtgaccagtgcccttttggttcacaaggaacgtctcctcttgtttaagtgacttggctgagcttgctacttctgctttgagagcccaatatcaggatcaagacttcgattatccccaatttacagatgaggaaaccatattgggcaggaaagaaagtcacctcaggagagcaagttggacctgggcactggctgaggacaaaggggaatcataatttgggatgtagcttgttaaggggcctcccaagtgttcttgtgatccaggtgtggagaggatagagcagaatggttgccagggagacgagggtagggtgcactgccagagtgggagaaattaaagagaacacgcaacaaagccttgggacagcgggagggggatggaccacccagttttgtgctacgggagaagagagcaagaaaaggaatctgtgttaaatcccgacagcctgcaggagaagcaaatgcccttcattttcttcatcagcggcgagactggcatccctgtagctttgagaaaccatgctagtgtggatgccagctccctccagcgggcctgactgggagaccttgggctggggttctggtccggggctcctaggcctgatgggaggagagttcagcccagctttcctgtacttcagctcgtatgcagatgatggccattgttgaaatgagagactcaaaggaagctggaatctgaacttttttgttgtctcatgtggacacctgtgttcagtttcgggttctacctcttgctgtctgtgtgttcttaggtgactcgcttaaacctttctgagtctcattttcttcatttataaaataaaagacataacatttatgtcagatattgtcctgagcattaaatgggagaataaacaagcctcttctgcattcccctggcttccagtgggtggaggccagagaagctgctaaacatcctgccaggtgcaggacagcccccatcgcaaagaatcgtctggcccctgatgtcagtaatgcagtattgaggaaccctggtgcgggggaaacagaataaactcagaagcttggcagatctcaattcaaaccctggttgtaccgcctccagcaggccttggtcagggaatagcatctagctaaagttcattgacttcattttgttttcattgaatttatgttttgctggctttccatttgtgagagtgatacaaatttcctttaaacatgaagttgtaaatataaacaggtaggccattcacaggaatatctaaattatgtcgcaggaaaggtggcactctcatatggcaataattacgacagaggccagcaaatgacctgcgtgacctggagtgacctgagcactgactcccaaacgccctctgtagaacgtcctgcatcccccagaccctttcctgggtccttctgtgccctatcaccccctagaccatccagacctcaggccacccatctctccgttaccagagcagtctccgttcccgaacgtgctggtcaccagcaacagcagctgctcctcctccaggcagctcagcctgaacttgttcatacagcgaacgcggacagcattgaggtagacataagccttcagctcccagtagacgctctgggtttcctaccctgcccagacactctgggcttccccccacacctcccccagcctggtgctcctgtgctcatctgtctctcccagtgcccagcacaggcgtggcacggaggaagcgaatggaccgatgtgaacacatcatcctggattctccttccccgctcaagccctgcagctaacccatcggcaagccctgggggctctgcctccaaaatcctgcctatcccatgtccaaacacctctcaccatgtccactgctctttgcagttctgtgtatgtggaaatatttccccaaaattggaatgagcaggtcacagctgtgcctggagggaacggccagggaaatgtgccctcgccttgctgttctatccaggcccacccagctgaggatgggggacctgccaccactctcctggcagttccggactcctgggaaccagcaggtgaggacccaagagtgttttcagtgacccggctgacctggtcatccgtcagtcccaccttggcctaggcctctgtgcagcacagatcacagctcattccatcctggcattacactggcctgtgccctatcctcagggtcacatccgtctcccagaagccgtgcaaccctggaaaacccaggtctaacagtcaggttcctcctctgtgcattaacaatggcgttgacgtctgctttgcgggacgctgggaggggagagggaggtgtatgctggagagctccccaggggcaaggcctggttctgcgtcactcactgtcagatcctgagagcctggggctggcccagcacgtggccaccgttccctaagagttggatttcatccctcagtgctgaaggcaggggatagagcttagacagaccccctgcgtcctgtcttctttatctacagcttactcatccttgcccctttcacgtgcacccggcagagcaggtgttcactgagcttgagcaaaattcaagctagagcagctgatggatcctgaggcctagattcactgtcaaagtgtttctcaacggtgctctccagaacaccaaggaaaactcattgactgtataagtctgaaaatccctgcccaccggtctacctttgtgtatgagcaatcagctctaccattcagcccaggtgtgtgtttgctggaccatgtgaaggaagctgaagagacatgagtggaaggcagagggtgagtccaaggtgggatcttgggacaggtacgagaagttaggcaaaaatgggataattctagccttcataaccttagataatagttcacattattatttagttaatagaattgtacccacattaaatttcttaaatttttttaagagataaagtctcactctgtcacccaggctggagtgcagtggtgcaatcatggctcactgcttcctggaactcgtgggctccagcaatcctcctgcctcagcctcctgactaggtgggactataggcacgcgccaccatgcctggctaatttctttgacttttctctagagaccgggtccacctaggtttcccaggctggtctcagacttctagactcaagtgaacctgcacctcccgcctcgacctctcaaattgctgggattacaggtgtgagccaccacacccggcctaaatttcttatgtgccatgggactgcaaaacatcattattaggggcagctggatggaaggtataggaggacactatagtgccttttcaatatttctgtctaaaatctaaaatcatttcaacaggaaacatttatttcaaaacgtgaaggtggttatccttccatgagtttaaagtacaaaggcaggctcacggcgtcgtcagaattcagaacgatggtcgtggggctgggggtgttgggaggggctgggcatggttggctttgtgatctggggtctggtgtgttccatctctgaatgtctctcgagctgcactctttcttaacacattctcataagtttaacaaaaaataaaacgaggaggcgaagcttgcttgggttgttaagcctagggaaattatccagccatgagccctggcccagatgcttctagaagcctggagggaactgagaactttccaagtggaggccgcagaggcaaggtcctgaggtgggagcacactgctgttcgtccctagctctgaagggggtgccctggtcggaatcagtgctgggcgcactgcagggccgggaagtccatgcccacgttgtggctcagtgcagtgaaagccgatctcacccgctccgcagggtgttcagcctgccagcaggtggccggctggtcctcctgggatatggcacggacccagcagctctgtctgaaatcataacggcggaaccaagggtcccctacgtccaggtccgttgggaggcggggcatggagttccactgcaggaatctccaggaaccctgaggtcctccctgagccagggccgggctgggcacaccctgagtgcccacagggtaggtgtcttcccggacagccccaccaggacagggtgtggaagaacgaggtgcccgtggcggggaagctgaccaaatgggccatgggaaccgggctggtgggcctggaggggcctgcctgtcccccttgcagagggtcttcccgccacgtgaagctggcacaggcctggatgccgacgacccttgctcgggtttggctgaaaggaaaacagacgcggtcagcatctccagtgagcccacgcaggcctttccgggctgggccccacctgcctgcgtctctggagtcctcggggtctctgtgtggcccccgtggcctgacactgaggacacgcctgtagtctgctgatcccagagggaggggtgcgtgctgcctggcgtggggaagctgtcgtggcatggcgggtggctcctgggactgcccccagggttcagactggctggcggcttcctgccacacaccttcgtcccagggctgttgggcctgggatacggcccccagtcagaactcaggtgggaggggccttggatgtcacccagccccttgccacctcaggtggggacccctctccgcagtgggtgattgggcccggacgtgggtcaccctctgccctcctgggctgcccagtccatgccaggactgaccgttcccacttctggctgaactcttggctctggccctgggcccggggtcccgcctgcgccctctccctgaaagctccgtgggtcagggacaccgattcccttgtctccctggctccaggctcgttgtcctggcaagcttggaggagcgtgcaggagtgaggggcctctgctgctctctgaggctgtgggtgcttgcagggaggggcggggtctcccacaaatgggtctgggctcggctagtaacttggagggccctgcgagggggagagggagacaccgcagaaagtgggagggggcttgttggagggtctcgcccacatccccctcctgcgtgcacagcatgtccagtatacacgcactgagcgcctgccctgaggaccggtgggcctcctgtactttcttagagtccaggaggaagaggaggaagaaaaggtgaagaggaaggcccaggtagtagggttgcgggtcccgggcactcccctactattgactaccccagagggtgacatgggaggggacatggcactggagcccacctgggggtggcaggtccccctgctttcttgttagtttcttcatagaggccctaagatgcttgagcacagtgtcatcatccctggcccaggcatcaacgaaccggttccaaaaacgtgcccacgggccacacctggacgtcttcgtgaggcgctctagggacagggtggatatcaggccaggggagttacctgggaatggtcacagctcataccccgtggccacttcagtctcccactgggcggtgccggatccttttgtggccaccccaggcgtccagatatacacaggagactgtggctggggggtgatctggacagggaagtgctcaccacactctcgactttcatctgggtcatgtggggaatgggctcggtgtcacagtgtcctgcccagcccacctggccagacctccctctgggccagaacagaggatcatgaggacagtgtgaggaagctgccctcgggccagtcggggtctgaccccagggctccccaggccccgctgggcacacgtagacttactctactgaaccttaaaggcgattcttgttatcggcatcaacgcctgttcgccttctaccagatacacgtcccacaggcgcagggtgagcccgagagagatctgtggggacagcaggtgtgaaagaacctggtccttccaggctggggctggtggctcgagctgcgcacactggggcttcagtctcctgagtcagtgaccttccttccccatgagggtcgcctgagccctccaggacgctgggtcagacaaggtcttgaagctcctcatgggaggcactcatttgagtggggatgtggctcctggagagaggggcttgcccagggcttgaggcttccctgagccctctcaagtcgggtcctggcccagtctgcccatgaggctgggcctgagccccagccattgccctgggatgacccctcttgggcagagggttttgcttgtgtgtcctttggggacccgcctgagcctcctgtgggctgggagtgagccagacccccgggctggggaagcagggcactgcagggcaaggagggtccctgagccagggtctccctatgcctccttaccccgtcaatcaatatccggatgaggcagcctaaggacgaacactgcccacatagatctttcttgtcctgatggaagcaacagaggtgctcaggccactgggctgccctaaaaacctccctcttccagggcctctgaagacccttcccctagtgcagaacactgggcggtgtccagagctccccacaacactgtcaccttcccacactcccggtggacacgctgccctttgccctgctctgcgggagctgggcccccatccctgtgcctctgtctcctccagggcaggaaaggaaaccaactcccagcccatggagaacccgacgtcccaggtcaggccctggctgggactcagccagtcaccagccccacgaggggctccagcccccctgctcctacagccccacgggaggcagggcctctgggaagagctgaggggaccataaactcacctgatgccacatggtgttgggtagtgacgtggctaccacatgctcctgttggtcttggagcccctggacggtcccgccatttgggctgtgaaatcctgagaagcccccagcccatcgtgaaatcagagccttcccccaagatgtggagccatcagctgcaagagctgggcagctggagaggcccccaaaccccaaggcctcccaccctcccatctggtgaccccaacatgcggcctttaccctggggaggtggggcgggaacagtccctggagcctggctggaggttcccctggaggcctcctgggccagggtgcaaaaagggcaagcctgactttcaggccaccacagggcggctggaactgggtgggtgctgggcttcctggtcatctcctggtagtggggtcgggccagggaacaggggatggggagatgctgccacctgggcttggtcggcccattcgtgggcaccgatggcagcaggagcccgggcagctggagggcaggaggactctcagggagggggagagtcagctgcacagaatcagagccggagggcgtggctccaggacacagagggtggccacggggaggatgagatgccctctgctgatggggatgagaggcgtctgatttgggctttgggggtcagccgtggactcctgtgggaccctcagcagagacatcctaaagtctcccaacaagctggtgacacaaggagggtgccttggctgaaagctgtgatcacctggccagggtggccatccccaggtctggctgcaggaggtccccggggcagctgttcacttaccctgcagggagtgcctctcactggccagcagctgcaccagtgcccagaatgcatcctcctcaggaagataaaggaggaacaaggcggcgatgtggctcaggtccctgcagtagcccacctcctgcaagagccagagtcaccatggaaggacatcagctgggagggctgagctcacctgggaggactcatgtcattggagagggcagaggtgactggagaggcttcctctgaaggagaggcttcctctgaaaaagaggcttcctcaggatgcacattcatttcatgacaagagccaagtccatcaggcacttcagcaccttgtccaaaatgtctgctgatagcaccatcctgtgtgcgatgctgccaagctcctgggctttggggcagccccaggaggacggcgtcatttcttgttctgagaagtggtggtcaggcccaggtgacaccaggagtccaggccctgactcctttgtgtatcagcttgaccccttgagaccacccccttccttggaggtttatgccagcagtgagctgacatcctacttcctatatcctggtgggtcacaaatactaattttaaaagaagcaacgacacccccaccagacacccactcctgtgaatatggaaatatggcccgggaacctcactgccgggaatactcaccgggttatactcctcatacgccaggaggatgtaaagtagttcccgctgcctaggaaacagagaaagggggctttggtttgttttgtgcagatgttgttaatttcactttgtctacaaagcctaacagcaaatcccatttcaggttcagatgattcaccggataagcagtgagctcttcagggcctgagactcttgaagaaatgtttcagtaaaatccacatctgtgacatgcaaatagcccagttgtacagtgcctgatccttttcactctgaatgattttttttttttttttcagtttgcacacaccccagttcagtctgtgggtgtacagttcctccacggttccaaaccaatgtgcagagtctcccggccaccgctccagcccctcctggggcgactccttcatcctccaagtctccagggtggcccctatgcacccagcctctccccgatccgtcagcccctggccacccagactgcttctcagtccctgtggtttggccttttccagaatggcctaggaatgggaatcctactgtggtagcttattgggtctggcttctgtccctcagcaaaatgcatctaggatccacccacgttcgtgcgggcatcactggctcgttcccttttctcactgggtcttccgtttgaagggaggaccagccttgctctccccattcccgtgttgaaggccgtccccgaaggctccgtgtgtgagtgacgaggagtcaagcagtgaacctggcatgcaggtttcatgtggatgtcagtttccaaatcagtgggttcaatctctgtgacactttggggatgcgtggttcaagtccatcgagctttgtgagccactgcccaactggctgccaacgtggctgtgccatgtcatgttcccagcagacctggatgagagtttccaggacccctaattctcccagcatttggtgccctctatcctgccaccctcccgtggctcctaccatgggtccccatgggtcagggagagcacctttcaccattgtgcatgattttgtttgctgccttccatctcctcaggatcctcctgggttctggccccacatgttccagtctggcccagggcttggaaccagggaggtgctcggttcatggtgccggctgctccctgggccaggagagctcttggcagctgtgtcatccctcctgggtgaccctggcttctgctccggggaagcccccatccctctcattcaccccatctctgctgggaccctgtggcttacttggttccgtatcgatccctgaagaatatatgcctccttaatgtcccgcttacgtccaggtccatctgctggatgtgttcagatgacctcttgcccttctccttcatgatctgtagggcagggccaagaggaggaagcagtctcagaacagatggaagactccctgcccccagtggcagtcagcccacagtcagcacttcgggaaggaaggacagaaggaaggtttccttctgcagaaagctgcattttggcttgttactgaagccagggagggtcaccagagctgagtttgtctgtggtgactgtgtcaccatctgtgcccagggtgttcatctgaccttcacccccagctccccagggtggtcttgacgttccctccagctggagacctgggcccctgacacggcctgtcctgttggttgtgctctggctgagcgtacctggtatcttccggggtttttcaacttgatttcctcaatgttcaggaggactgaccacatcgggccccggatgttcatgggaattccctggtacgctcgatctatgagctgtgggcagaaaacaatctggtgtcgcaggccacggggtgaccccagtgaggaccagagcccggggattctggaaattgttggttttggccccatgattcctcagtagaggtgagatcaagctgggacagggtctcccttcccaggactgaaagagtggatggacactcagagtcgaaactctgatctgaaccttttccttccttcaggtcaccagggcatccctagccttgagctccgggtagtcccagccctagattcagattccctcccagcaaggtgacgcttgcacgaataggcaggaaatctggcgaccaggcctgcagtcctctgggcgaggacagcgtgccacccaccctctgagaggctgacggcgccaggccacagccatgggtgcctgtcccctgtctctgcagagagtgcttcctccctccacacattacctttctgctgtttttgtaggtgtcccattctcccagcattttcacccacttgctctttcggctgatctcccgccgaatttgctgtcaaatgaggcatgttggagttagcggagctgccaggcttcccagagccgcccgcggatgctgggtcttgggctctggagccctggtgggagccagctggaaggagccagggaagggcagacctcaagggctgagagcctttgagcaaatgagcaccagtgggctggctttgggaccccgggatgtaccatcctcaggccacagccacaccagtcttaggtcccagcctctaggtgggatcctgacacaagcgcgcagccacccccaagccaggactgtggttctccttttggaattttatcaaactgccaaagttaacagcaacctggggtcaggtccagcagggactgctgcccctcccagtgacagcgcgttgccctcacccgccaccgctcaggccagctgcttcctctgcctcactgaccacccgcccagtccctacgtccctggaccagcccctccatgcatcaggctcttaccttcacctcccgcgcagtcagaggaggcagctccgtctcactgtaaggcaacccaggcagagctgaggaactgcacggggcctggagcggccccagcctgggtgccggcccccagaaaggactggctctgtccctttccagctcagggctcagcccaggagaaggcacagggaagggaggacaagggccttcctgtggggctgactcccaggaggggcaggacctgggagaagaaggagtgtagggacagcctggccggggttactggggcccctggcgtggggggcggtcaggctgcccagtggggctgcccgtcctggactcgaggtggtgctttctgctggagctgagaaaggttagccctgagatgggatgggggccgcccagggtgggtgaccgggccctgacaggagtccctcagggagtgaccacatcaccccgccagggtcaagggagcctgccctgagacctgccccgtgtactctgggtgcaccaggggcccatcccacttgacagccccaaggcccttgcaggttctgacctcccagcatccacctgcctctccctgcacccgagccacacaccctgcgtttcagaagtggcacggctcatcagctccctcccgccctacctcccctgggatcctctgtctctccatcctgtgatccctgagggatgggctcctggctgggctcctcttacccggccccagatcccttcccagcaccagacccaggtctttagccgcgagccctgctgcctccccggcctcaccgtgagatgcccagaacggggccctgcccatcttccccccgttctcctagggctacagcccccattgtcaccatgccttttcccctcacgggacagtgagggccatagctctaggggcatgggggagaacaggggcaggtgggccctcagagacctgctggacaacagccctgaggccgggccaggcgtcccctcaccctgtggccataacccttgcatctcaccggggttgtctccaagtagacagggccagaccctcaggctgcccagctcctcttgtgctcacttgccgacagaactgctgagcgcccaggggcctgacctagcccagtctccattcccaccagctccctagatgggccccacacctctggcctaacaacaacctcgggctggacctgcaggggagtcagggaggagttctgtccctggaaaggaggttgacccgacctggtgagacatgtcctgcatcagaaaggcctttctaaaagcaaacccatccctgagctgagacaggtgctttaggggtgaggggagtgcagaggactcactgtacaatccccaaatgatcgacgttgttgttgtagcttccaaaagacttaggccccttgtcctctggcagcccagctcggtgtccctgtagcccagagggagccttggtgaggggtccaaggtaaagggtgcaagggcctgggggcattggccacccgtccctgccctgtgctcctagggagcccaggaccctttgaccagggcacactggaagaggcctccctccaagaagcagaccgacttgtaccttttcgtatttcataatgatgtcctctcgctcttgtgcccaccaactacccgcgacctctaccacgtccatcctgtgagacaaaattgtctaaaggttacactgtacgcggcggcttcggagaacacctgaaccgctctcgccgggctcccagatgctggctggctgcgtaacccccattccaccgccgcccccagggaaaaaggggccagacccagtggcccacagctgctcgagtctctggagtctcaagtcccaagcaggggtgggcatcttcccaaggacttgagtacagtgggacctagacagagaatcctgttgtcccccagtgccatgaaatggggacacaccggccccagcaggttgaatggtttccacctgccaagggtgaagggcccatgatgggctattccagggatgtggaggcagactggggtcagcgaccagaggtctctgtacaatcggcctcctgggatgctcagggcctcagagatgcccagtttcctacagggaacaagatctctcctgactgctcggttctactccgctcatcactttggctaccgtggctcttcagtctgaacagtgaagccacttcaggaataacgcctgttgagcaggagggtgttcggtttgggggatgagaaagatctattgtacgcatggaaaccacgtctcttgcggagggactgtggagtccaccattctgagccgtcccaacaggaggaggcttcattttcctgggtcactgaggaagaacagtgggtccttggtcctggagaacacctggatggaccgtccctcctgggaatactcgaggcaaaaggagggcgaggcctcaagaggaccacacagagcaagaaatgcctggggagaaccctagtgcccggacccctttgaacagaagggaagatagtctcccctcagccagccctccagggctccttcattttccacagctgcccaagggcagcaggctcccccggacaagggaccatgtgtgttcagtggggcccacagcgaccatcgggacccagcttagggcacagaggtgttctgaggaccgtcagtggatctataccagtggatctgtaccagtggatctgtaccagtggctctgccaggaccaggctctgccccatcgggatcggaaacctgggcagatttgggatctagggcagggaggtcacagggttcaggcctgaattccagcacagcacacggcagggctgagagcaaaactcagggtcatgtccggattcccaggccggttactgcctctctgaccccagacgtctcatctgtcgaatggttacatttgggaacagcacccactctacgaagccaccatggagacgaaagagccaatcgtctacacgggcagtgtagaacgggcgcctggtgagtgctcagggatgaccctcctcggtagctgccccacagaggccaacaccgcccgcaccgtagccactgtctccaagtccgcctggagggaagagagcaggtcacgctcacctgactctgatgaatcagctggcctgggtcatgcctctcagggagaaaacctttgagtccacagagctgctcacagataccactgcctgtgtgtaactgccgtagaacactgaggcaggccagagagcggataggtgctaagcaccagtgacattctgaggtcatggcacgcatcacaatggggccttgcccgggtcagcagcgcccagagtcagggtcctccgctgcctgaggcgtcaacatgcctgcctgcaatgtgtttgtgcacgtgcgtgcacacgtgtatgtggctaaacatgtctgtgcacatgtgtgttgcttctctggccaggcccggctgccccactcatgtgtgcacccagttcctcatcactgtcacccccgaggcccagggccagcatcagagcgcccagggccagcatcagagcatccatggctgctccctaacctcagccctccctgcccagggtggtcctgggatacacataggggtggagggaagtgactgctgctgctgctggatctcagaatacaaaagctaatactattacctaatggtctttttagtgtctctaatggtatcgctttttcatttctgatattttaactgggtatttctctccatgacccttggatattctagctagaggatcctgtgaggaaagtgccgggcacacagtaggggctcactcttctagacatgttatctaaaacctgattcatctgtccttccacgcagggcctaggggatgccaaattccagggtccagaaagagcttgggataaaatgaaacttcaaggggacggctttgacctgggctgagtctgcctgtgccgagtctgcctgtgccatccaactggagtctcaagtcctgaggcaggacgtccagatgccccagtgcagggtcctcctgatcaacacctgtccccctgtactcattagcaacctcacccaccctactctcaaagcacacttggctctcatatccaggagctctgcatctgtagattcagcaacagcagatggaaaatattcagaaaataaattggatggttatatttctattgaacatgtgcagactttgttcttgtcattattccctaaagaatacagtatcatgaccatttatgtagcatctgcattgtattacacatcctgaataatctagagatggtctaatgtctacaggaggatgtgcatagctgatatgtaaatactaggccatgttatgtcagagacttgaggatccatggattttgtcatccccggggaccctagaactaatccatggataccaagggatgactgtagaaactcactcaggaaggcttctcattggaggaagggcccagttcaggacacacagggacatctccctggactactgtccattcatccatccattcatccattgtctccccccacccccccatctcggactgtcccaatgacagccctagcaagaagagacaagcaacaagataagttcacgttgtccagttttgaggtattggaagaagttgcaccggtatgagaatagtgggtcagttttctacaggatccagaaagcatatcgggcagcctcggggtgcggaaaggagcctggcctctccagcagccacacaggcctgcagtaggatggggctggggctggccatgtggatcacttgggcctcatgaggggaaaggaaataccagggggcagaagaggagcatgggggcagctggttgcctaaggggaaggcacctcagggaaggggactgtattcatttgttttcacactgatgtaaagaaatacctgagattgggtaatttataaaggaaacaggcttaattgacttgcagttccggaaacttacaatcatggcagaaggggaaggggaagcaggcaccttcttcacaagacggcaggagggagtgagtggagaaccagtaagtgccacactttgaaactatcagctctcctgagaactacctcactatccggggagcagcacgggggaaactgtccccaaatccaatctcctcccaccagattcctcccttgacacaggaggattacaatcccagatgagttttgggtggggacacagagccaaacatgtgagggtctcagtctatgttgcagctcccctggggctgaggctgagtacagacctgccggccttgccctatagcacgcgagggctctgccagtgtgctcccatctcctgcttcctggggatggtggtgacttcctccagagaagggtgtatttgttctcctcctgcccctgcagggcattgtggagccctggccaagttctcccaggataagggcaggaaacagggctccttgcccttcttgttgcttgagtgacaaccctggggtcatccctaggccccgtcactgcccctgcttctaaactgagaacattttggcaaatcttcctggtagaggctgggggctcatccctgctatctgttctagcttggtagagccaggttaagacatctgggcaagaagagagtagagtgtaccccaggaagcgtgggtggagggcactggcctttgggcttctctggaccagggtgggaagggggaagtttaccaggaaatagagctctcaggactatgtttaggaggaggtggtaatgctggtggggggacgtccattcatccatccattcatccattgtctcccccgaccccccatctcggactgtcccaatgacagccctagcaaggagaaacaagaaggaagacaagttcatgtggtccagttttgaggtcttggaagaagttgcaccagtatgagaatagtgggtcagttttctccaggatccagaaagcatatcaggcagcctcagggtgaggaagggagcccagcctctccagcagccacacaggcctgcaataggatggggctggggctggtttggggtggaggataagtgacagccaaggtttgtcagcatgcagaggggtggctgactcatggactaggggctgcggagcccagtggttgcccttagttcttggatcctaggagacttctggagcctggatctggacagcctaggggtggaggtggtgaggggcagggctgggggcgggaggagaggcctcgcatggcagggtgcggggcaggaagccagccagggactgctttgcagtgtctgctcccatcgcccttcccacccccaaacccacccctacccctaccctggtgcagggtcggtccggggcaggtgtcttctgctttggcctcagcagatcccaagatggaagccggcagccacgcgggcatgtcacttgcgccagctttgtcctgcagtttctgcttcctggagcgtgggacgcccacccaggagagcacgggcagaccccacacctctcattttgagggtgctgggaggtgggggaccaaggtcctgcagccctgtgcttgtgccgtgaaaattagcctaggagtcccatgtccacctgtctacgtggagccccaggagcgtgaacagtggcatgcagcgagatgaggagggagagagaactggaaaagaaggagagagaaagagagatgaggagaagggaaagtgagagaggaagagagatttggagagagacagaggaggctgagaggataaggagggtgagatggggagagagatacaaaacacaaagagacagagagagacgtgcaggagtaggaggtcgagttactcttgatcccagttcccagtgaaaactgtaggtcgccatcacctaaccacacatgcaataaagtctgcctgctgcttagagccctgagaaccccttctcatggagcataaaacctttgactactgcccttcctcaccgcatttttgttgtctcttctggtgaaccatgatgtcttgtctattgccttcctgggctcaaggatccatcaaaaactgatgcttctttggggagagtctgcagtgccttccactcactaggctccccaggaagcttgcacacttggcttgggccccaagcagctgggtacatgatgggactctgcttctctctttcagtaagaaggagaactaagaaagagactgaagcatggtctgtggagaaggcacttgtgcaaacaccaggagaatgaggggcctgagttgtcttcgtttctcctaaaagcatgcattcccggctgggcgcggtgactcatgcgtgtaatcccgccactttagaaggctgaggcaggcggatcacctgagatcgggagttcgagaccagcccgaccaacatggagaaaccccatctctattaaaaatacaaaattacccaggcatggtggcacatgcctgtaatcccagctacttgggaggcgaaggcaggagaattgcttgaacccagaaggcggaagctgcagagagccgagatttcgccattgtactccagcctgggcaacaagagtgaaactccatctcaaaaaacaaacaaacaaacacacaaacaaacaaacaaacacattccctcccaggccacccaagtgagggcatgaagcacagcgtgtgtgtgtgtgtgtgtgtgtgtgtgtgcacgcgtgtgtgcatatgtgtgtttgtgtgttgcaggggttacagtggacaggatgtgggagggcagctgcagctccaagctgcaagtctttctgatagaatgcttaaaactccttggaccacagcaagagagtgttttcatttgcacccatttttattagcgtttgaacctgtactttttgtagcatgtaaaccttaagctgcttaactattccttgaagcatttacaccagcggttcccaacctttttgctacctgagaccagttttcttgaagacaattcttccacggacccgggagaaggggaagggatgatgtggagatgattcaagcccattacatttattgtgtgcttcatttctattatttcactgtaatatataatgaaataattacacaactcaccataatgtggaatcagtgggagccctgagctagttttcctgcaactgcatggttccatctgggggtgatgggagacagtcacagatcatcaggcattaggttctcataaggagcacgcaatctagatccctggcatgcgcagttcacagtagggttcacgctcctatgagataatggcaccgctcatctgagaggaggcacagctcacgtggtaatgcaagggatgggaagtggctgtttctacagatgaagctttgctcactggctggctgctcacctcctgctgtgtagcctggttcctaacagctggggatccctcatttacccagcaagataaatacattattatgtcaattgaaattcttcaccttgaaccaccccaaattaccttgcatacctacacccacccaagggtcccggagcacactttgggggctgcagacagtaagcctggagctccatggagcattccatctctccaccatctgtgggctaacaggctgtgttagtttcctagggctgttttacagtaccacagactgggcaccttcaacaacagaacgttactgtctcacagtactggaggccatgagtccaagatcaaggtgtcagcaaggtgggtcccttctgaggctgtgcaggaaggctctgttccaggcctgtcttctcatgcgcgggtggacgtcttctccctgtgactctccattaagggtgattctggtgagggctcagaagaggagacttggacagaatgttggtaggtaaatgtgtcagtggaaaccagagggtagacaggactccatccatgcccagggctttctggggacagacctgtccaagcagcagcgattcccaaccgagttctgtttctggaaagccaggcaacagctggggctgggccctctgggatttgtttagtgacccgatgatgtgggaggcctgcagtgggtggttgggtggggggtggtactgcccaacctcattgcatcactcacttcccaggccctgccctcaacccctcctgaccaggccctgtcctggttctcagccaccctgtcccagtgggtgcttcagcccactcactgaccaagtgagggactgactccaggttacagagtgctgtgtttatgtgacctgagaatatgtgtgcgcagagtgtgcccgcagtgtccttgtacagttgagcatatacatgtcctgcccgtgtgtaggcagcctgtccacacatgcctaggagtgtgactccatgtcctggtagatggggaaggagagagggagttgtgcccagggtcccctgattacttctatgggtgcatgtttgtgcatcttgttaggggtccttgggggtatggaagattctcccctgggtgcccttgatcacctgtgtgtgcgtgtgtctgtgtgtgtgtgcattagggggtgtactgtgttacagcatcctcaaccaactctgtatgtgtgcatatgtttgtgtgtgtgtgtgtcttacaggtatgagcgagtggatgcttccactacgtgtctgcacacgtgtgcgtgcacttgcattgtccttgcacaccttcgtgtgtcccgtgagagcgaacggagccccgcatgtgctggcacctgcaggaacgtgtgagtgagtgtgcgatccgtgggtccctgtcctgctggctccccgcttgtcccgagggagtgcgcgcacggggtcccaggccggcgtgtccgccggtgtgagtgcgagtgagtgtggccccacgcagctctctccgctccgcgctgcctgggcagcccgcacactcacgctgcgtggttgctgccgggtgacacgggctgggccggccccctgcccgcccgcccctggcactcactcgcgctggccttcgcggaggccccgccgcgccatgccgggcctgctgagccgcccccggcgggggtcgctccgggccaggccgtgcgggggcggcgaggcgctgcctgtatgacccccggcggcgcggggaaaaggcgaccgtttgcatccaggagcatgtggccatcgacgtgtgccccggccccatccgccccatccagcagatctctggctacttcccccacttcccgcgggacctgccccatgacgcccccgcgcgcccagccactgccagcgccggccgccgccgcccctctgacggcgcccgcgaccacgacaaggatggcgaccatctcttcggaagcctaacgatccagcacaggtcccagccctgcgcagccgcccgccaagccgccagaggaccagccgaacgccaaaggctaggagtggacgattgcaggaagtttccaactcgccgacttcgccccactccactggctccggcttggcggtccccggcttcggggtgccctccgtccctccccctcgcgtcgtcgcgttctcccttggcataaccccccgccgcggggccgcagaccccctaagcgcttcgtgcgctctccgcgccctgcccaccggccccgacccctcccccgaccggacgggagaggtgggaagtttgggggcacccgctgtgggtgtcccatttgcggggctgggctccggggagccggcgcgcggcgcccgctccctgcccgccagccgtttgggagctcaggcgcgggcagccgcttttgttcccgggaagggcggagctgcgtcccggggagacacgcgttgcagccggcagcgtagttgctccccgctggccggccgctccgggagggccccgcagcggagggtcggggctggggcgggctggggagggggcccagggctggggccggttcggcctcccgggtggcgcgcgggccgaggagctaggaggaccgccgcgccgcttgtcctttggataaaccttggcggttcctcctctggtgtccgtggaccccgccgcggcgttctccagggccgcggacctttgcccaccggttgcgcccgctgccccgggcagaaaggacccccctcctcccggaccgagccccgagccccatggagcaggcaagggccagagtcccggggccgaggcccgaccggcggacgctccgggaccttttcccgcccccgagggtgcatgtccggccggggccgggactggctgggaaaccgaggccagaagaggtcgcaatccagcgaggaatcggtttgtgtggggtgggggtgggatgggagacccctccccaaccccaccagccccagcccagctgtggcctcagccatgtcactcagaaaaccagcgtcaaaccccaccctgcccaggatgtggaccttgcctggtgagagtcccgctcggatttccccagggcccctccaccgcgcagcaggggtgtctgcgctgggcccaggcattcaccagggcctgcaggctgccagcctggagtttccctaggatcaaatgtgccaccggaagctgaaggtggggacgaccagtggccccccccggagcgaaaacccccgcatctctccaggatgggggatctgcttgggggtccacttaggggtgtatccctcaggcattggaagtgcggatgggaggccccgagccatggtggctcccccagtccccagttctttctctgtgtgaatccagctttgcagggacggggatgtggtgcatttcccggaagagccggggtcctggggtgtggggagctggggctggggtgtggggaggggcccagggtgggcaagcagaagcaggactggcacaggcctctggagggcctgggggaggctggacgccccggggtgcacccttgcctgtccgctcttctaagggtccgtctcggtttgcccatctgtaaatagggttgattgtccctgctctacgtggctgttgtgagcattcaatgagcactgccagtcctcggagactcttgggtttttttattgtgctaaaatatacaagtataaatttcccattgcaaccatttctttttgctccttcactccccacccacccacccacccacccatttttagggtacagttcagtcatgctcagtaccttctaccttcacactgtgtgcaacccatctccagaagcctcttcatcctgcaaaattgaaactggacccattaaacagcagctccccattcgtcctcccccggcccctggcaaccgcctttctgcttccttctccatggatgtgactgttctaggaacctcatataagtgcaatcacccagtatctgtgcttttgtgtctacctcccttcagtcggcagaatgtcttcaggcttcatccatactgcagcccgtgtcaaaacttcctttttcaggctgaatgatacttgagaatcagaatctcctctcctgaacacttcaccagcaacagcatctgagaggcccagggaggggcagggctggggtttgggggagaggctctcctctcaaagccagatgccccccaatctatcccctcagtgccagcaccagccagggcctcctctcatggcttactcctcctgtccctcccgtgggagccgcccctaaaccatggggtcagtttctgtctcttgccaactcactagctggggagggtctatccaagagcccccctaacagctccctgacctggaatcagcctcctgccctcccccttctgtggacagaggtcagactccatgggagggcagccccacagagggctgggtggaggcactggtgggaacccggggtcagggccagggaagccacctgtttgggcacagaagctgttggcagcacggtgacacggcctcaggcagtgcccactggtctttttgcttctggccaaatgtgtggctgttcagggtgctcaggggcctgccgggtgaaggagaggagaggcggcagcagagggcccatcacagtccaggggtcagaaggacagagcaggcatcactccgtcccagtgtggcagtgcccccagcctagcccccacgggtgtcttggggtacagaggtgggacaaccagagccactggacagacatgccaaaacttctggtggcccaaagatatgcaagtgaaatgtgtcaagagacaggacccagtgaaaacattttgagctacaacaaacaaatgtatacgaattgtaagaataagacacagtggtcagggaccccctgcacagggtgggccaccagattcccagaactctgcactccaggcacgtggtgggaaaggcaagaggccagggtgagggagttgggtttggaagagcagccatgtcactgtgggtgcacatggggctactgagccaggccctgtcccagaggcagccccacagtgcagggcacagctcacgtatgcccacctgacctcagccacttctctggcatctcacaggggcctggcgtgcagggaaggggaggaaacgctctgcctgccaggccctgtgtccacgtcgtctccctccctctcactccagccctgggaagatgggactcttacatccttgcccgttttttttgttttgttttgttttgtttttttaattttgagaaacggtttcagtctgttgcccagactggagtgcagtggcatgatcatggctcactgcagcctctgcctcctgggttcaagcagtcctcctcccttagcctccctaatagctgggaccacaggcatgtgccaccacacccagctaatttttaaagtttttgtagagacagtgtctcactatgttgcccaggctggtcttgaactcctgggctcatgggctgggattacaggtgtgagccactgcgcccggctgaggcgcagatgatgataaagctgaggcttcgggtgaaaagtactcatccacttcctagcgagtgaatacaggggctgagcccagaaaccatgccagccaggcccccaaacttctgccctcttccagtggcagagaagtaggtggttgggagccccccgatcccccggagctctgccaaaccaaggtggggtcggcctgggagggagactcagcctccccttggagatgagcctggtgtgagcagccaggctgcctccctgacccggctgggtagaggccttgcggtgcatctttgaataatgttctggggttaccggctgcgccccacagatgccacagctgcctccctacagccctgtgctccagcccagaagaaaaaaaaaatgcggttttccgaaacaagagcctgctgaggtcagcgaagcccctatctgcccatccttctgtgtgtccctgggtctgcacgcttggctgggttttctaagggaacggaaggcagagtgagtgaggggcgccgtcttgtggaggaaccctctgtggccgatcagcttgtgtgacctctgtggactgactgggagttgtgacaaatatggccagaaatggggcctctccgacggtgacccggggttatgtggatttagggtcagtgagggacgtggcctctcaggaggcggtgctgggaagatgggggagaggagtcaggacgagggaagggcctgaccaaagcagggtggggagggaggctcagaggaaggtgagccacctggctttcaggatggcgaggagagaaagtctgtcctgacagaggccccctaacagctgccctgggccaggatgtttgtgggaggggagattgcaccgcgatgccaccctcactccctgtgtctggaggtgtggggccaggggcttctgtgacaggggccatgaatgcacccagccaggagacccaggggacaagggcatctgctggcccaggcacctgcaggccctggcagctccatcccccgatttcccattcacaccctttgctgttctctacccgggacctgaagcccatggaccacaatgggctggcagacccctgtgtcaagctgcacctgcggccaggagccaggaaggtgagggagtttcacccaggcttgcccaccagctgtgcccacctatggggcctggaccagtccagggaagcccacagctgccactccccctcagagcccaagcaagctgaggagacctcagccactcacctccatgcagagcgcccagtctgtcccacacccgggatgccttccagcgttacctacctgctgatcgggggaaacccctggagaatttccaggctggcattttataagaagcattctcagctggaggttactatgatgtgcaaacaaagactgtggtcagatcacactggaaaacattgttaaaccagtttctttactgtaggacttaccagagcctttaatgtgctgatgggctgctcctcgactctcagtaagggggatgaagtaggcagcatctgcccaatgtatttgaccacagaatcctcattcccatgagagatgggccaagaggccaaccacaaatgcacttaaggcaccagcacaacagtgcatctaggagaggagagaaaaaaatgctattaaataaaagcatcaaggtgaccttgagccatgaaaaatcagaacttcttagacttccttccttctgtgcatcctacacttcagtgttgctttatttttagtttcacagggcagagtctgagttgacttggggacctaaatgtgtatgcctggggcccaccgcagtccaggaggaccaccccagaagggaacattgcgccttctctggggaaggcagggctgtaggagacacggcagtgccccaccacctactcctggggaagaaatggctccccgcaccaggcctgggtgtccttatgctgcaggtggagctcagggatgtgagagccaagagtgagtgtaaccagggaagtgtgcccaatgcgggagctcagtgacccctaactcgtgggactggagccggcagggcctgttgtaggaagtccccgggactctccccggtgttttataaagagcagtctccttgtagaccagctcctgaaagcagtgcgagagagggattcctgtgtcctttgcacggtggggaacctgacgctgccacagagctggaattgaaaccccgggctgcctgacctccaaacctaggccggggtggcgggcatcagactgagtcagacacggagctcagagtcgctggcacaggaggaaggagtggtggcaatactcccgctcagagaggccactgcacgagcatgcctgaggccaggatgggttccaggcagaggggacagtccgcaaaggcagggcatgccctgggaaggagactccagttccacaccaggtgtcctgcagaacccaccccagggcaccaggggctggagctgggatcctccttggatgagcctcctatggctgctgcagcaaatgaccacaaacttagaggcttagagcaacacacttactatctcaccgctctgcaggttagaagtctgacagtggtctccctgggctaatgtcaaggtgtcggcagggctgcgtttcttctggagcctggggattccacccatttcctggctctttccagcttctagaggccgcccgccctccttggctggtggcccattcctccaccttcacagccggcctggttgcatctccctggccttcttccttggtgacatctcactcttctcttctctgtcctttcttctgcttttaagaaccctgtgaccacattgggccacccagacagtctaggataatctccctaattagtcagctaattaacaaccttaaccccatctgcagcctcagttccccatggccacgtcaataacatattcacagcttcggagattaggacgtggccatctctgggggccatcgttctgtctaccacaccctttggtgctaataagatcattttttcctttctccaggcaaataagcttagaacaaaagctctccgtaacactctgaaccacgtgaacaaaaccctcacttactacaggatcactcgtgatccacaagaccctgcagtgggtgagggccctcggctgcctgctccctccccaacccccacccagagaaaccgatgcgggtgcagggtcaagttcagacctcagacccaagtctcccactttggtccctttctcccctcctgagggacctggaggacggagtctgcccctcctccttcccggcataagcatcaggtcagctgcagtggagaaagtggtcccttgtgcttggaaagaaaagcaagcattcctcctggttctcactctgcccttccccttcccttccactacctggttcacgctgagtactcggggcctccaggtggttgctcatggcatcctggccctaccaccaccacagatgtccctttcgggaggacttgggggcagtccagggccttgtctctggggaggcctgtggggctggctctacactgtgaccacaactttgtagattccccacgatgtagattggattgtgcacatgtgcacacacacacatttggagcacgtgtaagcacacacttaagagtgtatacccatacatacgtacacatatcatgaaaaaatctataatgaaacatatcaaaataactgtgattatctccatgtggcaggagaataggtcattttttcttacatgtgtgtcttgttttgttttttccaaatgttccacaatggagattcattacttttatgatatggaaaaacaacaaatgttatttagaaaccgaatccataatagctgtaatattacaataatttagtctgggcacagtgcctcacacctgtcatcccagcaatttgggaggctaaagcaggaggatggcttgagaccaggagtttgagacaagcctgggcaacatagcgagtcccccatctctacaaaaaaaaaaatcagattaaaaattaaaataaataaaataatttaaacactttgataaaagagagtgaaaacaaatttggggagtagactacatgaaggctgggaatccaccgggctgagtggcctttttcttaacatcccaaaatggaacaaccaaacacggctttagaaactcttccagcacctgccagcatgtgtggcctatacttctctggagaggaaacccgctgtcccagtttggaaaagaatctagtatgagactgtatctgatttatctgtttattgagacagggtctcactctgtcacccacgctcggtgcagtggcataatctcagctcactgcagccttgacctcctggactcaagccatcctcccgtctcagccttccgagtagctgggactacaggcatgtgccaccatgcccagctaattttttaatttttcttttgtggagatgggatcttgctatgttgaccaggctggtcttgaactcctggcttcaagcgatcctcccaccttggcctcccgaagtgctgggattacaggtgtgagccaccacacctggccttgtatcagattcagtactgattattttttttaactattgttaagtttagcatgtcatcatttcagaatacactgcttctcaaaagaatgaaggctacaacagcctgagtctctgtttttcacgaattccccagatgattctgaaacacaccagctcgagaccctccactgttgcatgtttgaaagtagtggttctcaaacttgtctgcaactagaatcacttgtgcagcttttaaaactctcagtggcaagaccgtactccagaccacaaaactcaggggtggggtgaagggggctgttcatcagtagtgtaaatgtccccaggtgattttaatgagcagccaggtttgagaaccagcgtcctaatgggagcaacctcatatccaggtgttgtgcctcctgagcctgggaaacaactctggcaaaaaccttgcgtctgaataactttgtgttctctgtctccatctggtggtcattccgctacattgctattatttacctgtgcaacttgggctcttgtacttttaagaaagtttgccaaaagaatcaaaaaaaccaaaagacttgaaatttcaagaaatagaaatggctacgaaatatgccattataaagaacagaatgatctaagagttataaatgcatttgaataatgcatctcaatctttggcagtacttggcaaattaaaaagcagtcaataagtgctacttattcccattataattaaacataagttagaccccatcttttgggtaccagtgattcattttgaatgaatggctttaattcaacaaaaaaacatatttagtcttattatacctggcatactgttggcagtggtgaacagacacagcctgcatggtgagaaacattgtgtgcgtgcatgtgtgtatgtgtgagagatcgagagagagagagagagagtgagagagagattattattttaataaaaagactgtttgtgagtataccgctccatgagttttgtaaccccaccccaatcaggattccaaacagtgagagattatcattttaataaaaaggctatttgggggtatactgccctatgagttttgttgccccaccccaatcaaggttccgaacagtttgatcactcccacaaatctgcttcatgctccctgtcgtggcatccttgcctcaccccaatccctggccaccaaccgatgttttttgtccctgtagctttgccttttccataatgtcatgtgttcatacaatatgtaaccttttgagagtggcttctttaacttaccaaaacttccttccttctgcttgttttaggtttattttgcccttttttttctttagtttattaaagctgaggtttagattgttgactcgagccttccttcttttctaaaataagcatcaaatgctataaatttccatctgagctcttctttagctgcatctacacattttgatttattgtatttttgtttttgttcagttttaagtattttctaatatcctcatttcctttgagactacctcctttgacccatggattacttagaagtatattatttaatttccaactatttagagatttttgtcagttatcgatctctggtttaattccattatgctcagagaccttgctttgtattatttctgttcttttaaatttgttaaggtttgttttatgggcttggagtggtggctcatgcctgtaatcccagcacttttgggaggccaaggcggatggatcatttaaggtcaggagttcgagaccagcctggggaacatggcgaaaccccatctctaccaaaaatacaaaaattactcaggtgtggtggcacaagcgtgtggtcccagctactcgggaggctgaagtgggaggatcgtttgagcccgtgaagttgggctgcagtgagctgagattgctctactgtactccagcctgagcagcagagcaagaccttgtctaaaaaagaaaaaaaattgttgttttatgatccagaatgtgatctatttgttctagggattactgagaaaggcaggttggggtgtccaactgtaattgctgatttgccatttctcttttcagttctgtcaggttttgcctcatggattttgaagctctgttgttaggtacatagatgcttaggattgttaatgttttctttgaaaattgaccttgttatcattatgtaatgtccctctgtatccttggtaaatttccttgctctgaagtctgttttgtctgatggtatgtaattactccagatttcttttgattagtatttgtatgatatatctttcttttttgtcctttcatttttaatctatactatttacttaaaatgagtttcttagacacatatagttgagtgttgggttttttgtttgttagttttttacattcaacaatctatctttttattagcatatttcaactttttaaatttaatataatcgttggtatgtttggatttacatttaatattttattgtgttttctatttgttctctatttttccctgtgtttttcattcctgttttgacttttcctgccttcctttggattatttgaattttttggaattccattttaattcactgatttttttaaccatatctttttgtgtaagttgaaaatgtagttgctttagggattacaaaacacctaggttttcatagtctatttaggttatatatttagtgcttcacgtgaaatgtagaaaccagcctgaccaacatggagaaacccggtcgctactaaaaatacaaaattagccgggtgtggtggcacgcacctgtaatcccagctactcgggaggctgaggtgggaagattcccttgagcccaggagtgtcttcaggaaattaaggttctctctgttctctacaggtcaagtagttatggacggtatcctgaacattctaattttgtgttatgagaatctgggccatgttggaatcctgtgtttttgctttggcaggcaatcgtcctggttaggttcagtcacaagttcccacctgcctcctgcgggttgtggttcaatatcaattaagcttcagagcctttgccgcgctgttcagatccgccccgtgtgtgcgccacccagtggcgggtacgagactggacagtgccttgtcccaccgttcagttctcaaagcctttgttcagatccacacatggaatgcctgggcatgagcccaggagttcacatacaactttagggtattgccttcttgcgttccctcctctctgaaatctcaacactttacagtctcaggggtccctctttccggtcctctggctagaaagtcagggttttaactgtactgctctgccctacagtttctgtgactgtctgcctccacggccaagcatggaaggttgtgtaaagagaaaaaagccatgggcatgactcccttgctgttgggaccattcttcctctggcagagagatgagtttccttcccttgaagttctaggcacctgcctggctgccactgctgcagtgagattgcctaggggctggtgtggggagaaaagagacagcaaacacaggatttccccgcttttgctgacctataggggtgcttacctctctcctaaggtcagaaacagaggctcagagctctttctatctgcatctggtatgcaattccaggttttggttcatctttgagtccaggccaggagaccccagagggggaataaaatggcagacttactgccactttggtggtgtttagagttctcttttccttccctgatcttcctgctaccaccttgttttcagagctagctgctccatgcctgtggtccaggattcatagtaacattcagtgggaaagacaggacggagtatgactggaatgagaatgggagaagaatttttatttaaaaaacaaaagcatggatttttaaaggttgaaaaatgcacactaattgggggagaaatttctctttccctccacagtgtggtagctgtaagcctgattcctggcttgaatttttttattcacttttccagatgacctttagaatcattttgtccttaaattagccaggtgtggtggcacacacctgtaatcccagctacttgggaggctgaggcacaagaattgcttgaacccatgagcagaagttgcagtgagccaagataatatgactgcactccagcctgggtgacagagtgagattctgtctcgaaaaaaaacatcattttgtcctttaaaaaattctaattttgatgggaattttatgaaatgtatagatttggaggaaagtagccttttaatagattgagtccttcagtctagtaatgatatatcttctcatttaaaaaaatcttcttttatgaccactggtaaaagtttttattttttttcctcagaatccttgcataagcttggttaaatttattctcaggtatttttattattaaaatttttattaaaaatcaaattggttattgctgatatatagaagagctactgatttggcatgtttactttgtaaccagctgccttacagaacttttattggtttttttactttctgaatattggtttaattactttctgaattttggttttattactttcttggttttctgcacacaaggatttgtgaatccaatcactcagactggttttctgcaaataatgataatttggaacctctttttgaaaaaaaactttgaaaattttgatttttggtttattgaatcacattggccattaaaatttcttgtacagtattaggtaatattggtgatatcattcttgcttgtcttggttctgagttttagggaagtccctattaagataggtatatttcattatgctaatgaattatctttttgaattcttttttaaaaataattttgatcagaaaaggatactgcatttcgtcactcttccagcatccataaagatgaccatttgtattttcttatttgacccactaatgtgattgcattttattaataggactttcctgcattcctacagcaaatcctggttggtcatggtggagactgtaaagcaatcattctcaaggaggggctttttcacgcagtatgcctggagagaggctgcaccaccaccgcgttcctccccgatgagtccagtgagccacggctgcgggctacggtgttgtggtgctcgggtgtgttggaaggaaatggtaattgaatgagtgctcattttccaagactttggccccacccctaatataatgtccatgttcctggagctgaggatgccttcagcctaggcttgaggactcaaggtgtgtactagaaccagacagacattctccaatatcccactctagggatcttactccaatgagaagcagagaaatgctagccccgggagaagacctaggaaaagtgtaacaagaggcaccatctgtcactgagcccctctctctatgccaggctccgagccaggtgctttacattatgggagctactcctgaacaactgtgtgagatactggtatccctttacagataagtggtcaagtgactgcccaagggtgtagtcattaagtagaggagttgccctttaaaaccaggagtaattcctgagcgtgtgcaagctggagatgtgattcctgaagactggctcgcagagatgggtcatgaggcagaaccaagacctactcccctacttccctgttcagtttgtgtggcctctcccacttctagtcccttctctttcctgggagggacccatgggggctagacagagggctgttcctagtaggatagagaggtcctgcagcagcgcctcttcctcactgcttatctttctgatccaggttcccgaggcatgccagctagcacctgacctacaagattccagctgtttaactgccatcacaaaggctcatgatgtgttgacagtatttctgcctgctgctctgaaaattcaaggaaataaatacctgacatttattgaatgccagaagctgttctaagaactttctatgtattatctattttagtcattataatatccttatgaaataggcacttttatccccattttacagatgaataaaataaggcacagaagggttaagcaactttcacaggtagaaagctgcacagccaggatttaagcccaagctcttaaccactgcactacatcaatgcagcaaaggctgaatgaaccagagtatttgatttacttagctcttatgctggaaagatggtgaggcttttgctcatggtctgtattcaagcacaaataccaaaatcaaggacacctttgcattggtgctccataggaggtttccttttttgttgtttagagagaaggtcttactctgttgccctggctggagtgcagtggtgcgatcacagctcactgcagccttgacctccagagctcaagcaatcctccacctcagcctcctgagtagctgggactataggtgcgcacttccacacccagctaatttttaatttttttttttttgtagagaccgtctccctatattgcccaggttggtctagaattcctagggctcaagtgatcctcccgccttggcctattgggattacagatatgagccatggcacccaacctcagaagaggcgcttttcttgagttctggaaggggataggaattaatgttttgtttgtttgtttgttttttactcgtcacagaaaaggttcaaagagtaagataagcaacgtctcataatgctgtagtctaatggacaagggccctagccatctgtgcctggatgactcttcctcccaatttttaagtgtcaaaagataatttagaatctggcattctgcattagaaatctgaaccagtggagctgtgtgctgattttcatcagcttaagttgtctttattgtcagtggcttcctttccccacagcagctttatggaggcacgtgcccaggcatatgaggagcttctgtcctttagtgtatgtacacccacaatgctgcagagaagagaatcagcatactgttgggacacagcaggtaccactgccttctgaagtttctagaggtgctatgccttcattgttttcctgcacatgaacattaacatccacatcaggatctggaaacctttacagaagctgaagttttaaaaagaaaatgaatgggattttattcaagataaggaaaggataagagtgaatcatcaaatgaaaccatgaggccacttcacaaatattttatcaaaaaactcacctgagaaaactcaaagaatcacagtaataagctgtctatgccatattttttttttccttttttgaaaatgccaagaagctactactaagaatgtattcaagagacggaagttccaagattcatcacagggtcaggtgggctcaacttagtttcctgggccctctataacacttcatgttcagaattgtctccaaataaaagcaatttaagggaacattcaatatgggtgtctttgctgtgcttgcagtcttaattctgtggacactgatattctatcaatggaaaattgagcctttagtgaacttgaataccctgttccccaatcactgcccagagagcagtttctgagcagccaacatgtcagaggcaggaaaacagcagctaaaaggcaaaggagaaaaatggaagacacctgcctttacacgtgtattttaagctaaataaccatgataaaatatcaccaacacccattttttgtaacttcttaattgtcccacatcaaagataagtatggacaactgtaattggttcttatatatccctaaattcctaattgaaatcaattccaataaatcgttggtgctcagtagaaaaatgcaaaatttaaatatatatattcagtagaagttaccttcataacttgtggggcattatcaaaatataattggaaacccctctttgtaaccaactaaccaaatgatcttttcttaaaggcacaaattaaaaggtggcaaaacaaccatatatttagtgtgtgggatcacattctcctaaagagcatcaggaaatgtaggtagaagtcaatgttgtagcctaggttagaaggccctgcttgctgggagttaactctggttattggattgtggggaggtgtggcagggaaggtggtcaggggaacacgggcactccagaagctcggagcagcagctcatcagctgtgaggcaccgtcagcatccttgcgtcctgtgtggctgtgaggcactgtcagcatcctcgcgtcctgtgcggctgtgaggcactgtcagcatcctcgcgtcctgtgcggctgtgaggcactgtcagcatcctcgcgtcctgtgcggctgtgaggcactgtcagcatcctcgcgtcctgtgcggctgtgaggcactgtcagcatcctcgcgtcctgtgcggctgtgaggcaccgtcagcatcctcgcgtcctgtgcggctgtgaggcactgtcagcatcctcgcgtcctgtgcggctgtgaggcactgtcagcatcctcgcgtcctgtgcggctgtgaggcactgtcagcatcctcgcgtcctgtgtggctgtgaggcaccgtcagcatcctcgcgtcctgtgcggctgtgaggcaccgtcagcatcctcgcgtcctgtgtggctgtgaggcaccgtcagcatcctcgcgtcctgtgtggctgtgaggcaccgtcagcatcctcggtcctgtgcggctgtgaggcaccgtcagcatcctcgcgtcctgtgtggctgtgaggcaccgtcagcatcctcggtcctgtgcggctgtgaggcaccgtcagcatcctcgcgtcctgtgtggctgtgaggcactgtcagcatcctcgcgtcctgtgtggctgtgaggcaccgtcagcatcctcgcgtcctgtgtggctgtgaggcaccgtcagcatcctcggtcctgtgcggctgtgaggcactgtcagcatcctcgcatcctgtgcagctgggccaggacaaactggctgaactgcagctctgcttgcagcttgctagaaatacaacttggtaacaacaggagattgtggacacactatttttcgttagtttattacaaaactacagatacaatacacaaaattctaattccgaaatccttctacattttttttttctgagactaaatgccctcaaagcccgtctgcttggcctgtattacaacctgactcctcggctcctggatgcacaggtcagatgttccaacaaccctgaccatggccagtgctatggagtcactccaaaggtggttgagccctctgtgaaaatttaaatggctgctaagtcattctaaataaatagtgaacggattgtttctgcccctaagatgaaatcccacagatcttatgctcaagctcaggtcttcctactgccgccttcgacatctagaaagtatggtgggatcttcactgatttgttaaccctgggagtgccccttgtgatccagatgagtcaaaacaaacggccaggatctcttctaaaaagcccatgatggcccttctggctgtgtctccagttggtgcctggatgctgcccatgtgtttaagggccattctgaccatctggtctctttcctgtgggctgtggggtgctccagtgtcatctccctctgctcctgattttaaaaactgtagaatataggactggaccatattcccactcagttcaagggtttctttcatacaagggaggtccgaggcactggccaagctcaagaggtgaatcagtgcctggcagatttgggtccgtaggctgacacagtacttgaattccaaaaagtctatggtgtcttcactcttctgtaaagcggtgaccaatgcattccagatccgagcatactggtcaacagacccgtactgctctctcttccccgggacggaaagggcagctgcagatctgatgcgcactttgaagttcttgcatgatgtcacgaccgatgtcagggcattgtaggcctgggaggtccatggggctgtccctagaaagaatccacagtcactaaaacaaatgcaggcttagaactaggtggggtgagagggagaggggtggaaggaagcttaaacactagtgctcaagacactcattttatgtgttcacttcattctcacaatcatcctgtaagacaagggtggtgactgactgtaggatcctaggtaagtggccaggtgccaatccccaaacctccctctttccctacctcagcctgccacacgcttagagcctctgctacccaatataaagcctttggtgactcagaaaaaggcttcttctctgggaggattctgtcccgttggggtatggctttgtgggcagagcgtggactgaactgcaaccccacctatcctctcagctgggcacttctgagctgtgtgcaagccacacactgcatgctcacctgcaacagcatccagacactgctctggccatagccagtcatgcattttattgcaaagaaaaagaaaacttacaatttcaagaataagatgcccagatttctatcttttctccacacctgtaggccctaggaaatcagcctgctttcctccttaccagagctactgctacccactccactttggggtgtccttactcaagatgggtgacagagtagaatgcagcttctcttaactctcccagcccttcctggcttctctgttgcctctgaagaccggcaagcaggccctttccatttggtggatgccagtgccattgacaatgggccactgctagagctatgagacactcacaatccgacccgtcagagtcctttatcagtttctagctcccttttcttatgtggctcttgatagctctgctactggatgctttctagttctcaaacttcctgcctctttggagcttccctttccctccaagtcatgcaggtaaacttctctctctagtaggctgagggcaagggccatacaggaaggctggtaggagccaaccaccactgaggtgccctggtttcaaggacttcttggctctccagaaggcggataaccacctcaatgggctccaacccaaaaggtcacccttaggtgacttcctcaatggaagaagccgggaagctaccttacatactcccagctgactggtctgcctggacgctctgggcaataaaggggagcagagccagactcccctcacttgatgtgtgctctcctctccaggaacacatccttaggtctcagatctgagagagagagatgcaataaagcgaacgctggcattcaaagtgagcgaggtttggaggctccgatccatacacctaagcagctactggtcctgaatgacatatcaaggtgcatggcatgccactacttagagacagatgccctccttacatttattaatggcatccacttctgtacacagctcataggggatttccagtttatattccctctcattccagtttttttccttcctgttttcttgaccattaaagtaatatatgcttattgtagacaactgagaaaatgaaaacagaaaaaatcctacccatccagaggcaatcactgttaataattagtccaatttcctttcagtcttttttctacccatctattgagatcattctgtagaaattatttaatacctgctttcatttgtttaacatcagaagtatttttccagattatcaaattcttgtaagtaattttaaatggcaacaaaatatcccattatatatcccattgtataggtaatgatgtatttcaatgtccccctaaacttgtcttcagtatgtctccattttttcctaatactatgacaaataacatgtgacaaacatctttaacaacaacgtagattggtgtgtgtcccaagaggctttccaccagggagtgaagggaaactttcttacctaaaggaagggcaggatttttaaatacatttcccattgcataacaagcattccatcggactttcatggcagcttctgttagaacagtagaaattagggcctggatagactcctcaatgatttctgcaaatgtgggtttttctatatgagagggttgcagaaaatgaagcaaatttccaagggcccggactgcattgctttttacctagaaaaaatgtaaatgctttagaaatctgtttggccaaagagatgtttccaaaagtctaatttcagctttaaaaaaacccaggaggtcttcaacttcttaaagcaagtccttggaactcacaaggtctgctctggttaacatcctgagccatcagaaatgtgaggttctacagaactcctctctctgattatttatttatttattttatttagtgctagacaggacctcagagaggtccatcttccttgttttactgagatggagtataaggaccgggaacaacaggacaaggctgattgatagcaagacaatgaggagaagctaggttccataattccagtccaatacttttctactagactagagtctcaacctctgcagcccatcagaatcatttggggaggtttctccttttgttttaaaaccgattcggaggccctaacctcagaatttctgattgaattactctgaggtagggcttcctgggtgattaccagattttcagaagtagtattaaagtgagcacatggtatgggtcaggtactgtgctaggtgctttaacataaggcatcttcatatccagtgaggtatataacttccatgttacatgtgaggagctgaccttcagagaagttatgtaatataccaaacttacccagttactaaagggcgagccagggcttgaatccatgtatgtctgacctaaagcccagacatgtgctttttaaacttattagtttaacaggtaatattcaaagccaagagctactcatctttctgacttgtcaattttttttttttggaaaataaaaaaaagttaattttaaaaggaatctgaatatgtcatgtagtattacaatgggcactgatatttttcaggaggcaggagacagtaaagaaaccatacacgtgtggaatgggccatttataccctgagcacaccctcagtctcttttgaacaggagtacatttggtgggacagtctgaggaacatcaagccacactgaactaccacactgcagctacaatacattaactatctgtttgggagatactgggttttgttgtgagtctaccttgtctttatccttggatgcttctatagctgatcgtaacattttcaagagcaggagaccagagaactcttcctggaaacttgggtctggtgtttccctgttccacccaaagcagacaacacatgttaaaaggtaaatacacttaaatatatacatatagaaatatattcaattagtataagcctaaaagtttaggaaaacagtttaacaaatctgcttagattatatcaagaaacttacattatatatcttttgacccaatagttccccacataggaatgtctcaaaaaaaaaaaaatctcaaaatgcagatttcatgcacaaaaatattccctgaatataaaagcctacaagcctaaagactaaaacaaatgttcagtaatagaaaaatggttaatcatcacacagtgataattatgtaatcataaataaggatttctaacaagtcaataatagaatgcttacacattttacatgttgcttatacgctgaagtgacaaaaagcaggacacgtgcacatgaataaccagctacctctggggaggggaactaaggtgtcagggtagaagaaaggcttcacactgaatgctgctttgtactatctggattttttttagcctgtgaatatactactttaagaaatttttttaaatgcattttaaaagtacagtaaccattactaaggttttgcttttatgttttctataatgtagacatattacttatatcggcatacagtatttttaatacatatatatcttaatgcattcctaatatatattaagaacagtttattaattttattttctgaaggaatatcaaacaaaaaaagcaggaagactgactgcataatatgcgggaactactgctgattctttcatggtagagatcgaggacattctcttgggccctcaatctcagaagtcagctggggaaagcaagctcagtcacctacatgttgacaatcagagtgtctgtcaggttgcccagggaccaggctgctttggctcgaacattcagagacttgtcttcaagtgacatcaatattgcatttgctgcgtctgcaacaaatatgacatcctgtaacacaaaacaaaacactgcagttactttagcaggtcatgctgctacctttgaaattctcacttattttcagataaagctagaagccttcatgcacatttctacttagaaataaaaattcatctactcaatcaatttactgttcttatattttacaatttggacactcaaaaaaatcccaggggaagctcccataattttggtatgtgccatggacacccgaggagcctatggattttgctgttatgaacatcgaatatataagctggcctgggacagttatctgtgaattctgtgcttggttgatttccgtctcgggaaataatgttctgaaaaagaaatgcatttccaaaacacatcctatgtactacacatcactcagtgagataaatgtcacaagtaagagtgaaagaggacattatttccttcttagtaaaaactatgtcagctttctaaatgatgactaccacctggtaatgacccatttcatttttattagatcattcattaatttaagcatttattgggtgcctaaggtcccaggctgtgtgctaagtaattaaaaattaaaaataaataacatatatatataatatatatatatatatatatatatatatatatatatggtaatgccttagttcatttatatatatggtaatgcctgtagttatatatatatttatgtataacactacatatatatatgtagagagagagagagacagagagtgtgtgtgtgtgtgtgtgtgtgtgtgtgtgtgtctggctctgccacccaggctggagtgcagtggtatgatctctgctcattacaaccttcacatcccaggctcaagtgagcctcccatctcagcctcccaagtagctgggactacaggtgcataccaccatgcctggctaatttttaaaattttttgtagagacagggttttgccaagttgcccaggctggtctcaaactcctgagctcaagcaatccacccgccttggcctcccaaagtgctgggattacaggcatgagccaccatgcctggcccatgaccatattttagtagcaattacagatatcagattacaaagcaatttagtttcctttaccatccaatgcaggagctctatatccacaaaataggggtgtcatggactacaaaaggggcacagaagagctaaataggctcactctgacctgtctgagacagggaaaaagcacatagactcccagggcccgtgaagttgcagctttcactaagcgattcttgctgtcattcagcccgagcagcactgtgatgcacagcatctgcctgtcattctgcaatgagaaggttgacaagggaaaaatgagaatgaaataactacaagccaaaggcttccataaaagatgtgaaatatctgtgtctgagaccataatcaggagttgaacaccattgcgaccttgaggctaccctggtaaaaagcaggttcaattcagattccataattatctgagcacccactttgtgcaagacacacacagcatctcatcacatttaacctttattaaagttgccttctttatagaagctcatttatgtaaataagaatggaggcaaatgtcactgaggaccaaagaaaaaaagcagtctgaatactgctattctgaatagcagtattctgaatgcttatgctcccccaaaattcctatgttgaaatcttcactcccaggatgatggtatcaggaggtggggctttgggaaggagatgaggtcatgggaacagagccctcatgaaagagattagtgcccttatgattgaggccccagaaagctgcctgccccttccaccacctgaggacacagctcacatggtgccatctgtgagccagagagcgaaccctcccaaggcaccaaatctgtgtctgtcagtgacttgatcttaattccagcctccagaactatgagaaatacatttctgttgtttagaagacacccaatttatggtattttattataacagctcaaacagactaagacaaataccatatgtgttggacaacaaatctaagtattttcacatacttgttatttttcacatgactaccatcttattgatgataataccaagtcttagagaggttaagagtcagctagcaagtcgaagagctgggctttaactcaggccttttaaactttggatatgaaatcttcctgaaatctctctgccttccaagcttcttctacccttgcctctaccacctacactctcatgcacagggggaaacagctttcctgatatattaaggcttcaagttttcctatttgctgttccccagtgccctcatccccaactcaagtagaactagcgccttttcatcagagatgatgctgaatactggttcaaaatgcaaaagcatcaaattctagctctggtgctccagccatgatttaagggtgagaaaacaccctcacattaccggcagattgctgaaggcctctggcaagatggaagacagggcatcacaggcgctcgcctggagagttgggtgttctgaattctgcagggctctgggtaaaggaccgttcagcatcatagtccagaacatcaccacctggaacggaggcaaagtaaaagctgcagcccaagacataacaggggaaccaacttggagctaagcctaccagaaatggccttagtgaaacattttcccttaaagtagcagctttctgtaagtgttttcattggttcttcttccacagtgatgtaaggactttggtttaagcctcccgttcaactcctgttgattaggagactgcggtctgataaagttacgcagcaacagtgataataatcaagaggaggctgaagatgatgatgacagtaacagcaacagcagcggcagctaatgttcttcagagagctcatgccatgccaggcattgctctaagtattttacaagtatcaacttattttattccttggcacaaataaatggggtctgtagcattattcctactttttcacacaaggaaactgaggcacaaagagacaatacaacttgctaatctgcagcaggggtgaactagaatccaaatcagttgacagtcggctagggctttttcaactactttgcagagtctgtgtgataataaaatgtaatattctgtgtaaggtttctagtgcagggcctggtacacagtggacactcttaaattgggcagtcggttctgttttcagcactttgaagaactacctcacttcacagcctctaaagtagccatgtcaacagtttcttttccatgctttatacatatcctgtgatttcatgttcatttgtgaatctctgtggttttggtatgttttatttctgttccatggacctagtcctgggttttgctgtgtatgtcatgcaccagttctgtctttctcctacttcagctcctggaaacccagtctgggtcctccctgccccactccagaagaatgtggacaaaaagtggttgccagtctccaggatggcacacaattacagtcacctactaatatttacacccttgtgtagtcccctcccatactgaacaggctgacctgtgtaaccaataggattgttgtggaaatgacagcacgaaacctccaaagctaggtcataaaaagcaccacagctctgtcttgctttctttcccttggatcacttgctgtgaaggaagctggctgccatgtcaagaggatactcaagcagccctctggagatgtcctcatggggaggaaatgagttgaggccttctgccagcagccaacactaatttgctaggtctatgggtgagccaccctggaagaggatcctccaaccccatcaagtcttgcaacccgtcagttgactgcaaccctgggggcatcttgatcccaacctcatgtgagaactaagccagaatcactcagccaagccactcctaattcctgacccacagaaactgtgagaaaataaatgtacattgctttaagctgctaaatgcttaatttgttactcattaatagacaagcaatgtagaaaacatgacttttttttttcacagatgaacactacctgagtgtgaacagttaagaggcttgcccaaagtcatctatctagcaaagggagaagtttgaattcaaacctagttctgtctgataacaaagctcaactcacttccctgcacatgttatatgaaagctttagtggcattctaaggcagggactagggttagaatctttaattcactgcaaggatgacagaaattgtgaagggaaaagaataggcagaatgcaaagggcagagggagcaaagaccaccaacactgagctaattttgcttttagcactaagtagaagccttttttggtgtggtcacatgcccttcatccatctttggaactggcacagtgtaggggtagcagaaacaacctgaaatcacaggaattgaatagaatcgtggaggggctggtgaggggcggcggggacacgggtaacggaattacctcctatgtgttagcatctttacatgtcatttgatttttcaacagccttgtgactgaagggttatggtttattattccttttttacaactaggaaaccatgcctataaccacatatccattaagtggctgatatggtttggatgtgtgtcccctccaaatctcatgttgacatgtgacctccaatgttggaggtgggcctagaggaaggtttttgggtgatgcaggcagatccctactgaatggcttggtgctatccttgtggtaataaatgagttcttactctgttattcacacgagagctaattgtttaaaagagcctggcatctcttgcttcctctctcgccatgtgacacacctactcccccttcgccttccaccatgactggaagcttccggaggtctcaccagaactagatgctggcaccatgcttctcgtatagcctgcagaactgtgagccagacgaacctctttgaaaaataaattgtccagtctgaggcatttctttacagcagcagaaaagagactaatacagaaaattggtaccaaggaatggggtgttgttataaagagacctaaaaatgtggaagcagctttggaacttggtactgggcagaggctgaaagagtttggaaggctcagaagacaggaagacaaaggaaagtttggaacttcttagagactgattaaatggttgtgaccgaaatgctgatagaaatatggagagtgaaagccaggctgaggaggtctcagatagaaataaaaaagtttgaagaactggaggaaaggtcacctttgttacaccttagcaaacttggctgcattatgcccatgtcctagggatttgcataaggttgaacttaagagtaatgacttagggtatctggtgaaagaaattctaagcatcattcaacaggtgatgtggcagcttctcacaacctatagtcggatgtaggagtaaaggaatgacttaaagttggaacttatcattacaaggttagcagagcataaaaatttggaaaacttgcaccctggccctgtactagagaaggaatccaagctcggagcaaccacttgctagacagattagcacgactaaaagggagccaggtgctaacagccaagactacgggaaaacagcctggagggcattctagaaatctttgaggcaacccctcccatcacacacccagaggcctaggaggaaagtggttttggaggccaggcccagggccccacttccctgcacagccttggggcactgctcccagcatccccagccttggctcaaagggccccagatactgctcggttttctgcttagtgggtacaggctgtaagccttagcagtttccatgtggtgttaagcctgcagatgcacagaattcaaatgcgaagaaggcttgggagcttccacctagatttcagaggattccctaagcctgggtgcccatgcagaagcctgccacagggacagagcccccactgagagcctctactagggcagtgccaaagagagatgtgaggttggagcccctacacacggtctccactgagcactgcctagtggaactctgggaatgggacacagcctacacctagcaaagccagaagggcaaggctgccagaagccttggaagcccaccccttgcaccagtgtgcactggatgcgggacatggagtcaaggactattttggagctttaaggtttaatgtctgtcctgctgggttttggatttgtgtggggcttgttgcccctttcttttggctgatttctccctgttggaatgggactgtttacccaatgcctgtaccaccattgtatcttaaaaatcagtaacttgtttttgatcttacaggctcataggtggaaggaacttgccttgagtcacagctgagactttgaacttttgagtgatgccgtaaagagttaagactttggggaactattgggaggaggtgactgtattttacagtgagaggaacatgagatttgtggtggccagaggcagaatgatatggtttggatgtgtgcctcctcaaacctcatgctgaaatgtgacctctaacactggaggtgggcctaataggaagtgtttgggtcatgggggtggatccctcttgaatggcttggtgctgtccttgtggtaatgagtgaactctcactctatgagctcatacgagagctggttgtttaaaagagcctggcatctccctcttgcttactctcttgccatatgacatgcctgctccccctttgccttccaccaggatttaaagcttcctggggcttcctcagaggtagatgctggcaccatgctttttgtacagcctgcagaactgtgagccagataaacctcttttgcataaaaaactaggttttatgcaaaagaaatattagttttactattgctggttatatgttatacataagcctaccacaaactaaactgcaaataaactgaaatgtaaaataaaaccaatttatactagtttcatgttttcctggattataaaacataatttttgacactggaagaaaccatatcatctactccatttatcactgagcttcaaaataaaactgcaactgaagcattaataaaagaaaactatgaattgacatttatttaccaagaagactggtgctctctgatcaggtgctgcagtggagtctggtttatactgctgtattaagcctgtgcccagttcttccagaagctgccaagaaaaagaattaccgaagtggagcatcagaactaatgaatgacttcacttgagtaacaccttcactctagtaacaccttcactctagtaacacctccactcgagtaacaccttcactcgagtgacaccttcactctagtaacaccttcactttagtaacaccttcacttgagtttggagatcgcctcaaatcaaggggaaacataatttgcaactaattttctttcttttttcagtcactgttaacagaggcattctttcaaggactgaaatcaacagctatatcttattaatttgttactgagtcaatgcgtggggtttatatgtaagagccgaaaacagaagaatgcatgtcctccttacctgaaatctctttaagaaatctcagaattgaaggacatgtggcagaagaatataaagtgaagaaaaggaaggatataaagtgaagaaaaggaaggatataaagtgaagagaaggaaaaagcattgtggttttgatgaaaattacctttgctccatgaagctgaatggatggatctgcttcccccatgcacttgcaaatcacctctccaagctccatcaagtaggcttgagtcattgaaaagtagccccttgccagaagagtcaatacctgcaaagagagcatggaattaaccctctaagacctgagtgcaaggctgcaatatccagaaaagtgttacaatatttcagaaatcgcttacatttaacaggggctgaaatctgttgaatgaaattaagaaccataatctttattttgtgactaacatcaataaactgtatcatagttttatggtgctttagtatatgattgcttttcattaacagaatctcatttaagtcttggaactattctttaaagtaggtattaactgaattttacaactaaagaacctaagcctgacaagatgaaaggacatgcttcatgctgcccagttaatcagcagcagacctcaggaccaggcctagtctcagatcatatttgtatagaaaaagtaaactcttttatctaggattgttttcttcctttgaaggaacaattattttgttactctaagcaggtacaagaccaaggaaaagcttatagagaattaaacatttaagttgcaaaaatcaaaaattaactgtacaatttcactcagaattattctacaatctattacatccacttgtcatataatacctgaagggactaaaataatttgcaatcaaagaacaaaaaggaatgaatctgctattttacaaccaaagaacacctccccaaaacaaaacaacaacaaaacaatacaccacccatacctaaaatacaattcccacgaacacaattgacatatggcttggttttacctgctcgctcctcacagtcactctgaaggaggaatggttacttccatttcagagatgaggaaatgaaatctcctacctgtaaggcctccagtcgcatgggggatggttcgtaggtgcttcctgctgcagagccagcatcgctacctgaacaggaatcctccttgggcagtacgacaatggaaatgcagagtcgaatgagccagcagggctctgaagaccccttaggtgagctaactgacgtttcttccagagagggtcctgcaggggctttcttccaccaatcaggagggctgaggtgaggggttgctgaattgctattaccgagtccagaagaacatggctgttgcagaagtagttggacttcaggtaaaggtgcgtgggtggacactatagctcccaagagtgtgagacttgacacacgaacattaacatctgtcaaaggaagcagtaagaacttatcatcatggcaacaactactgtaaagatggtagttatcccagcaggcaattaaaaattagtagttccttgtgtaacctgaatctaatcaaacttctagacctcatttccagtttggaaatacatgggacaggagagtaagttaacaccataaagaaacaatctgacaaattgagaatgtgatttattttgttatctttggtgacagagcttagagttcacattctataagacaattgggttggattctttcctaagtcagtttgatataaaaaagatgggtggggggactctacatttaaaaagactacagtgacataataactaaatgcaatgcatgtaccttgaatgaaccccggattttaacaagaaatatttttaaaaagctaaaaggtctgtgtctagactcatttttttttttgcatgtgatgtccagctgttccagcaccaattgttgaaaagtatctgctcctttgttgtagatcagttgactatatttatgtgggtctatttctgggctctctattctgttccattgatctgtttgtctcttccttggccagtatcacactgtcttaattactgtagttttatagtagattttgaggtcagggaatgtcagtccttcagttttgttcttctctatcaatattgtgttggctattccaggtcttttgcatatccatatatatttcagaatcagttcattgatatctgcaaaataacttgctggaattttgattgagactgcactgaatctatagatcaagttgggaagaagtaacatcttcacaatattgagccttcctatccaggaatatggaatctctgtccattcatttagttctttatttgatcagagtttcacagttttcttcatatagatcttgtacatattttgttaggctcatacctaagaatttcagggtttgaacattttaatgaaaaaaagttacttgaggataaagtcagatacttgaaaggaaactttgaggcatggtgcactctcctcagctgaagatgcagataatgaaaagttggtacagtggaatgagcaggggttgttctcatcttatttctgccatgaatgtgatgggaaaccttagggtaagacttatctttctgggtcccttttttacatattagtgtaagtagtgaactggacttagttacatctcattatctcatttgagcctcataaaaatcttatgatgtagttataattcttgctgttaggaagaaattagggttcagagagggtcatggccatgagatggcaaaaatgggagtgggatccagacccttggattgacttcaggtcccatgctcttcccactatgtcacagaaaacatccactattccttccttgttacaattctgcctgaaaaactgaactcatcagaatgtggtccgatctgaaagcttgcaaacaaaagaaaggcaaatctacaaaaggcaagtgtttatagcacaaatacattatgtgtaggaggaaataataagactgcacttagtaaagatttgaagttctggggttttatctgaacttcataggaaataacaataaagaagttaaattttgtattccagtttttctttccaaaaagtagataatatctatctgtccgtctgtctgtctatctaaccatccatccatcctctacctatgtgtaagggatataaacaatcatactcctcaggggggctgcttgcacctggctcaatcttaattctaaagggatactctggtcactgccctgagcattaaacaggcaaactttacaattaatcctctagctcacttccactgggacttgaggggtcaattcttgcaacagcttatacccctgaaaagttgagaagaataagcagagatctcttaagagttgtaaaaatgctttgaatatatacatatatctatatctgtatatttttactaatagtctgcatctgactgatacaaagaagccatcagttttaagccactacaaacctttgtggcgaatataaggctttatctggttccagactttggtcagcaggctgagttttagacgatcataaggtgcatttgatactaaatttgcaaggcactgtaaaacacaaaaagtagctcatcaaaaggcttgattaaaccacagcatagaacaaattttgcagcatttaattaaaaaagaaaagttttcacacaactaaaaattagccccccttttttttaataacacttgtattctcattggtacaactaaagataaagaagtatttttagcaaatcatttattgggacatacagagattatagataagatcagacgagtaggtacagacttccaaatagtgtatttttaataaaactattacttagttatattcttaagtcaagttacttttgagctatgtaaaacagtatacaaaattaaaacagagaagcctgctctggaacccacagttggtacattaccttaattatctgagtaacggtctgtgaggatgactccgccaccaaagctaacaaaagacatctgtgcaactctctaatgctgcaagcgatcattacggagaagggggtaaaagcccttctgtggtcactggtatcttcagcaacagaaagaaactgctttgagccttccaagatggcagataaaacttgcagagcacaggcacgtgtctgaaatttcgggatgattcacattgattagttgaaaattaggagtcagattcccttcttcctatacatatttaatgttcaaagtatttacaatcattttaattggaagaataaaggcaatgggattatctgttagttcctaaaaactaggccacttgcgtcccacacctaaaaaaaaatctttattttatttttattttagagacacagtctcgctctgtcacctaggctgcagtgcagtggcgcaatcataactcactgcagcctcaaactcctgggctcaagcaatcctcccacgtcagcctcccaagtagctaggactacatgtgtgccaccacacctggctaaaaaaaaatctagaaacccattgctgttaggtgttttacagtaagaaataaatctaagctacaccatagcacaaaaatctgaaatcctaagcatgagaataagaattagaggcctggtttattcaagcagaatgccaactgaaaagttagaactaaacagcccatggggtagaaaaaacacatgtgcctagagtctgtttcctattaaagttcctgagaacattatgcctcatattccactctgaagtatgtgtgttcaatgttaacttaaataggactttaggaactttgtgtacatactgcttggcagacatcattagtgatccaactttcagaaacagtcttaggtacaggaaataacactgcctgcagtgacagtatttgacaattcaaaaaaggaataccattaagtacaatcttatgaatggaaaggacaaaaagaacatctttgtcatggactgctgtatttgttaggaaaggtgtcactggcaccaagattttctttataaggttgaaagattactttcaattggtactcagatgattttgtagtattagaaaggaaaagaaagcccaactttacaaaaatgggatataggtaataagcataggactattaatacggaataatattgtactctcttaggccagctcatccaaaaatgataattaacattttcagtcaaaaaatttaaaagcagggaaccaacattacaattctagaatctaacctaaatagttactcaatatgaagcatatctgagtttggagcaaaaaaggttttcccaaaagccttcaattatattatctccaaacaaccaggtaataaatcaccaggcaggccttttatagagtggagtcgtagaaatctagacttattgctctgaagagaaatttgaagtacagtagcatcagacttcagaattaagcataatcccctaaggtgggaaattgacaatgtattaggaaaccgtgtgtatatgtgtgaaaaaacgagagagcgagagcatgaacacaagtcagctgatccaaaaaggacttagatcaggggctggcaaacttttctgtaaagagccagcagtaaacattttatattttagactttgtgggccagtttctgtcacaaccacccaactctgtgattgtagcatagacatgtaaaggaataaacgtggttgcgttccaaaaagacttgatttacggacaatgcaatctgaattccatataattttcacatatcacgagatattattgttttattttaaaaccatttaaaagtgtaaaaaccattcttagctaacaggctgtacaaaaacaggtggtgggccagatttgccctacgggccacagctggccaatccctactagaggctcgtccgaactcaacaagatagatcttatgctaaaccttcatttctttagaagacaattaaaaatcacaattccaacagctcacaaactgaatgaaattaaaaatcgaatggaaagaaatgaactaatgttccaaaagtcaaaaattttagcacaattttggcatcttaaggggaaaatcatgactatcacagatgaaaacaaatgtcattgaaattggttatttttttccactaagttacaaaatctatatagaaatttgatactatatcaaattgtacttctcacagttctgagttaatttcctttaaactctgtttaacatatctttgttgttataattgttacttaagatactgaatctggtacaagttttgcttcttttgctcttatatcaatatttaatatctggtttaccagtcctaatcagcactttcagcagaaattactaacgtgcaagtaaatcataacaggtgtagctcttcagagagctcattttgttaagttttcattgtctgaatatttaaaatgatgaatgaaaggcttttcagtcttacagaagtcagtgtgcttggttttactagtgtatagtttcacctccttggacatgaagacttgtctaaagctaataaaacagaaaagtacttttccttttttgctacttaagaacgtagcacaaatgtttgctgaggtagcctagtcaatcctaatttttttcctctttatgtgtgtttggtctcagaatatttctggaagggtgacaaagaagtccctgctgggagtaggtacattgaagtttccatgcagggcacatgactgttcacatgttattttattggatctcacttccaaagtcagttgtcttttacgtaacagcatttcaacattgtgtcagggactctgggttgggaggtatctaagtgatatggtttagctgtgtccccacccaaatctcaacttgaattatatctcccagcattctcacgtgttgtgggagggacttgtgagaggtaactgaatcatgggggctggtcttccccctgctattctcgtgatagtctcacgagatctgatgggtttatcaggggtttctgcttttgcttcttcctcattttctcttgctgccaccatgtaaagaagtgccttttgcctcctgccatgattctgaagcctccccagccatgtggagctgtaagtccaattaaacctctttttcttcccagtctcgggtatgtctttatcagaagcgtcaatacagatacactaattaaagactgcctgttctttgctaatacactaagcaaagattgcctgttcttggctggccatatgagagaaaatctaccattccataacagttaacaattccaaccttttcattctcttttctagttataccactattatctagatttcgatttgttttcactttttatagttatctgaaacagcaataaatcatcatcatgaaatttgtaaatcaggataattctcaaggtaccaagacaaaggtttgccctgtagtttgtttcttaagacaagtcttgatgatattctccataatatgcgtttataacacctaaggaaatcatatccaagaaattcttaaattagtcttgttatttttattgataatttgttctgtcccttttggaagtgtataagatgtgctctatgaagcacatttccaacatggaaatgtgatcatttcccaagtaccacagcactgccaaatccgaatggacatttctaagttttcttctccccaattaaccattctagcatattatgtttcaatttcctaaaagtagcctctgtttattgttggcattctgactggaagagtctaatcacctttccttctgtccatttgtctttagaaaatttcttagtacaccagttaaaattgtgcttccagctgagtatgccatgggtcatatcagacctgccataaactcaaaactaatcactaagcacttcaatgacaagataaactacagttgtcttatttaatcctggctaagaggaactccagccatctaactctatatgcacaaggagcacctgagatgaccacttggcctggagtcatggcagctcttttaacctggtcaatccagaatgctgttccattctaattacatgatctgttatttttaattttaatgcacataactttctagaagtctttattttaaaagcctgtcccactgggccgggtgcggtggctcaagtctataatcccagcactttgggaggccaaggcaggcacatcacctggggtcaggaattccagaccagcctgaccaacatggagaaatcccatctttaccaaaaatacaaaattagccaggcatggtggtgcatgcctgtagtcccagctcctcgggaggctgagacagaattgcttgaacccgggaggcagaggttgcagtaagctgagatctcaccattgcactccagcctgggcaacaagagcaaaactctgtctcaaacaaacaaacaaacaaacaaacaaaagcctgtcccatgacatcacctaccacaacacttttttctagcatatgtcttggtgcacagttaatcacactatggacagactgcaaaggtatgctccaagctctgttgtaaacaataattaccacacttatttaaacccttccaagctaacacttgattaaaagaatctcttaagtacgatcatttcacttgccattacactgaactaatttaatttctttcatcttttaaaatccactttaagtaggatgacttttttttttttttctctaggattttcttgtggctttttgtactggatctacaacatctccagaaggaagttctgtatcttttttcctcagcacatctcttgcattcaccaaagttaaacagcaagaacaagtctaaaaggtacctaaatcaaggagatggataagaccactttgcaataggtgaaatttctcatggcactttaagtgaaatgtaaacatttaaaaatatatgaagatataaacatcatgaaaattattccaattcattttcatcagctatgacctcataacctttttgtattcctgttctaaacccccgtgtcccacatccccttggctgggcagctgtgataaaggtgataaagctgggctgcttcttgctccacagcaccatctcgttggccactgctggcagctcccctagctggagggtcttcaaatatatattttcaatatttttagtagcttttatttcaattactctaatggcttcattactgatttatttgccaccactcatttttccatttttctcctaggttctcattcactattgatttagttaatttgtaaaatttctgccagtttaatttcctaggataaggagtatttgaaataccccacaagtcatttttttgcgtgtatataaaattgaggctaatttatttttctttaccttgtaaaagcttctgatgggtcatccagaaattttcttatatagtaagttactcaaggagatgactcatatggaattccaacgtattgtgggttaccacccctgaccccttaaggaataatcttaaaaacagaaaaggaacaatatgctgttggcctaattaaaactcctctttgtgggtagctggttacctgaggacacccagatgccattcagcatgactttttaatgttcattattgtaaacagcaggctattttccttacttggttaagtggctaaattctggagaagaattaacatattcaagcgaggcaaatatttgataagccatgagatatcttgctatagctatccatgcctgccaatcatttttttcttctttttaaaaataagtttttctcattaaaatatgtaaatatttattacacatgatttgaaaactagaaaagttgcaagaaaaaatcatgtttgggatcctactgtatacataattctatatcctgtgttttcacagaacattttgggcatttttctaagccttatgcatccttcatagccattatgtaccatgatattctactgagttgtttaagccatttctgatgttttcttattataaataccacagcaatcaacattttcataaaaggaagagaagcacagctgcttcagtgcagttcaagggagacaccaaagttagaattcagtgtgctcaggcttcaagcaagccctggggcaggaagcgatcctacatgatcagcctcagtgtattattcacataagcccacttcctattttcctgtctgtccagtggtcaagtcggaacttgggtcagtgttactaagagctatattcagatcagacaggataaggcagagataacaataaggatctgtaaattttttcttcctattataaagcttagagtttaaattctcttacctttggagaagggtctttcaatgtaagagtcatcaaggacactgactgtgggctgccaagttcaggcgtatcaggaataaaagctgaccagtagccataaagaacttttttttctatcgattttatagtagaaagaaaacaaactaaggctccttggcgaactttagcttggtaagacctttcataaccaagagaaaaaagaaaaaacacttaaaaaatcatttttttaaaaaaaatgcaaacatgaaatggtatttatttccaccaattcaaatgatacattcaaaaattaaacattctaaataattcctaaagatgtcaatgtgttattaaaaatttttctttcaaactacaatcaaaacatgttaagacaatttgtctctataacaagttattaaggctgacaattaaaaaacacaactggagaacaagagggcaacattttgatatcaggacactggtgttagacatgaaacactgccgagtatccatccatccattcaacgaatatctactgaatgacctatgtatgtgccaggcatcatgctgaggctgccagacataaacaaagccccagccttgacaagctaggcagcgagggacagttaaggagataactatcacatgttacgaataacaccaaggcagaaaaggcttcccggggaatatgatttctgagcccatatcaaagatgagtagtggttagcaagacgaaaaggcaaaaaagaatattctaaggagaggaatgacatgtgcaatggcagatcaagagaacaagtcggccgggcgcggtggctcacgcctgtaatcccagcactttgggaggccgaggcgggcggatcacgaggtcaggagatcgagaccatcccggctaaaacggtgaaaccccgtctctactaaaaatacaaaaaattagccgggcgtagtggcgggcgcctgtagtcccagctactcgggaggctgaggcaggagaatggcgtgaacccgggaggcggagcttgcagtgagccgagatcccgccactgcactccagcctgggcgacagagcgagactccgtctcaaaaaaaaaaaaaaaaaaaaagagaacaagtcatgttctgaataacaccatgccccccagaaatcaggctcttcaagttaaatcacatgcagcattcaggttaagttataaacttacatgcaacttagaatacaaggtataaaaatgtaacaaaatactactacctcattttactctgcatgcctccttcagcatcagaaaagtctgactcactactgctgacccttttccaactggaagaactgaaggatgaggagactccatctttttctgcagctccacttccatctaaaggcaaactctggacacccagggaggagggacaccaagtgttcccttcatgcaggttcactctgcctgtgccagtgactggggctgcctctatttcaccactggattccttttcctcctcctctccttgctggattttctttggttttactttggattttttctttttattctgattgtgggagcaaatgaagacatatataataactacttcagaatggcttttcactgaatcgttacttcttcattttaaagtgactaaatatgtccccaacatgtagtttaaagaaagaagaaaagagaaaagaaaaaagtgtaacttcattaataccctaaacatcaggcatgatgctaagtgcttactgtctactataagaaagaaggaatgaaatacatgagacacagttaaacacgtggcctgggtttaaattgtacctctgtgccttggggcaaatcatttagcctctcttgagcttgaccttgcttatctgtaagtatgcggctaatacctcctaccttgcacatgtgttgtgaaagtattcagccttctcaactggaatttctcaagagcattaaagcctatagaaaatgacttgagtgtctattttatcagttctccgagtaagatacatagctagtaccactccacatgcctgcacagaagagacggtagtctattacatacaatgctcatttcagggctttgggtctctgtagaagtagatactaagtagaagccagtttctttctttctccctgttactttctttctgatatccaagtatatctggaatctgtgtcttcctccacgttctcaaagtctgtggccttgaggaaggaagttcccattacttctatcttggactacttattgtggcccccagatccatattcttttatttgctatcacagtgatttttctgacacaaatctgatcacatcattcccctatataagattctttaatgaatctctattgcctacgagataaaaacccaaactactcagcctcctgtacaagaatcttatcattcggcctctgctacacaacggctccactctttctctccccgcactgaaactctagtcctactagttaacaaatgggcaatatatactctcattctctatgtctatgcaccttttggtttatctgcttgaaacactcattcctccttgtctgtactgctactcactctgaaatctctgtttagctaccacacctttaaaaagcctcctcttccccctccatttagactgagtgtcctcaatgtgttcccagagtactctgtgaatattctaatgagagaaacaataatattgcattgtagttgtttatttatccatctttgccttctccctcaaactcctaaaagcagccagagtctatatacttagtgcttagcacagcgtctggaacacagcagatgttgggtaaatgctgagtgagtgaatgagtgaaataatttctaataagaagcactttgatcaggtatgacatttctggaagtgaatccttggccatacatctgtatgctccaggttctccaaccaaagcacgagggagatggcagcttctggaaaggctgggaaatcaggtgaatgtaaggtgtggagatggtgcgctgactggtaggtgggcttctaacagtctagagtggggttggcaaattatggcccaaaagccaaatccagcccagcacacagcctgcttctgtaaataaaattttagtgaaacacagtcatgcccattcatttacatagtgtctatggctgcttttgcactgttacaatagagttggtagttatgacagagacctgaagtatttactagcctagtagagaaagtttagagaacgtttgttgactcctggtcttgagcatcatggggatgagaatgcttggtttggggtataaagtgaatgctcatttttatagctgttatactgactacacctctaagaagtataagatgctttaattggtattttgagcatcagatgagtttaaatttactatgctaacaaccctaaactgaaataaaattcaaggtaggcttttagggtagtagtgatgcaaatcatagaaaacacacacaacaatctattaaaaataagccacaacttaaatctaaataaacataaatgtaccaaagttggtcgagaagcactggattctgattgctgtggtttgataggtgttcgcccatcatactgaggaagcggagttgggtataacaccgtgggcatctctatgtttagtccagggagtccgtgaaacatgaatttctaataatgatgaataaggacacacacacacacacgaaaccaaaaaaaccattaatcataaaccattaatcataaaatagaactatttaccatgtctggatcacaacactcatagataatgttcaaaagcctactaaggaaatataaatgagatagaaaatagataccttgaaggcatagggcttaaagaagagctgaagtttatctggcctccagctggatttggtttggtcagatcaaatcaggtctggttttagtttccttatttatttataaaatttatccaattactttatctgtctataattttttaaacaaatttatcatttttatttacctatctccacctatagctatctctctatttgatgtgggagcaagagaatgccacaaggaaagaattacttcttactttgctggctgaagaagctgggtccccagagatgctggcctgactttccgactgactggcacgctcggaagctgcccattgacacacgtcttggttggcctgtctactacttggaggagaaagccaaggagaagcactggctcttcttgtacaaacaagtacaacatagtctataattaaatattctataggtcatactcccctaccgattcccttcctaagattcataaataattttaaaattttgatgcatttattaaatggagatttattttctgttcttaatattaagtgtctttgaatatgaacatttttgtctactctctcaaaatatatgtaagaacttttaatacctcaaagttagccttagaataaggatgtaaagtggtccttgtaccatgggttgaaacaggaaagacaatgatcatatgaagacttgccttacctttagcacagctaaaagtgctccaagttcatcagtctgtgttagtttcattctcccaccatttagaagtgactgtataccttttaatgcattttgcaataactagggggaaaagggagacccagttagaaggcagaataaaatctggttgtccaggaatcaacttactagcaccacttaggatggaagagagacagtctctagatgatgaaaaaaaactttattatagacacacatatacacacacaaagcagaaatgaagatctaaggagacctaataaactaccatgaattcttttctagaagaaaagaataatgaagtggtcttattgtacatgtttataaaccactatgtacaaatggtgagcaagaaaaaagagagaagatgtttagcaagaaaaatgtgacaagggataaaaaagatagcacagatcagaattgggaaagctctgtaatatggcaaacccagccctcttaaaagcaaggggatgtatgtgggaactgctgataaattatagaaacttggtttctggagggcaattctgaccaagattgatttcttgactcagtaatctcatttctagaactctctccttaagaaacacttccgacattgggatgatgtgaactgtagccttgtttgaaatagtgggaaaattttaaaaacttcaattttgatgattatgataatgattataaaagaagctaaccctctgctaaatgtaaaactcaacaacaataacagtaggccctttgaatgctttatttcatatacttctcataagaaccccacaatgtggttatatcagtcccttttcagggaggaacacagaggctccaagaagttaactaacttgtccaaggtcttccagccatagcagttagaaactatgaggtatattaacaggaaccgaatagatgtcccagagatattaagttttaacaaaacaagaaagttacaaaacagcatgttaaatatgatcccacttaaagctgtaattatgctcatttacatatagaaaaaaaaatctgagggcacacagcacaaattgtcttcagtggctatatccgagcaggagactagaaggaactttatctcagctatataacatttgaaatgtgttactctaaatttaaaagatgttaataaactgtcgtttgcatcgtatttttaaaaaagaaataaaatattgcagatatatttggtgaaatctctctttactttcatcttaaagatagtcactagcctgcaactattgcttttatactcagaaggaaaaagaatagtttcctctaaaaatctagaattgcaaaatataacaaataaaaagcttcttataatttaaaccgaaatggtatgattttagtctttttaggttacaaacatttcatatatgtgtatttctctagacgaagctaatggtgcaaattaaactcgttagtaacacttttccaatctgcttctagacacatccgcaacattcactacgtcaatgatagtccacttaccatgcaaaatgtgatatcatccatatcagatgattttggagactgtaaaatagtcagaaaagcttggaaacagacattttggtagggctcctccaaatacggctgtcctggcacactaaacgcatacagagaaaacaactcaaactcagtctcctttaaaatgaggcttgcaaaagactaattaaaaatagcagtaatatagactattagagttggaatatacccttgagtgcaactatgctatggaaaattattattttggttaattagttactgctgggggacaggcacagggctagaatgaatatagaggaagggtggtttccatacagaaaggttacagaagtttgtggtagaagaactatggagaaagaaaaatcttgttttagttctgctgttcagtcctaggagggaaataatccagacaggtcctgtcaagctagaatcacacatctgtacctgccttcctactcgctggacagcactgtgctatgcagagacgagttcacatttgtgctgctcattgtctactgcctactgtgagaatcgagggtgagcagctggggctgtttccatcttcttcaaagaaaagaaattgccctttacagatacatctcaccagcacttaaaatttgcatgaatatatccttctaaaaacttaatatgcttagaatttatatcaatagaaaacaaaattttgacatactgcacattatgtcactattaccacattttaggaatatggtcctagtctattttttccttctttacaagcaatactaaaattaacaaacaacataagatgattttattagtaaagtacatgggaaatgcaaagttagttatttgtctaagttggctctggcttcaggcacagggaactacctacaaagggcccaatagaggcactatcttattaccattgagaaacttgactggagccacatacctgagacataagtttgccatacaatgtactgcagctctcctgacttcaggatcagactgagccaagtcactcaacttcattaagagtccggtgttgcctagcagctctgggaggtactaagaaaaataagagtcaatgtaggtcaaagaaaagcttctaggaaaatattatgttttagacagatttcttctttctttttttaactaaatggcagttaagcaccaaaagactagctgttagataaatgtctccgatggatatgcaaagatatgccaaaaagcatcaataatgatcattactcccagcctaggtagctgctgatgctctttagtgtggccgtatggctgatgggtaatgataatattaagaataatgtttactatttaccgagggccatgaacttgacacgtattgtctcacttcatcctcagagtaactattttatacatgaggaaacaaggcccagagtggttgaataagaattgctagagattagtggcaagatagaaacctgaacacagtgttggcaccagagtctgtgctcctggcctttcaaaggaaggataaagcactttaaactaccttttgacatttggagccattgcagtacaccagagctgccagggcttgaagaatttccctgtgtgtccaggaactacactgatgaatagccgaaatagtatatgccaacaggaaatccaagtgctgttcatcaacaattacctaacaggacaggaaaagatatattctgatctaacttttaaaaaatattatgcttttatggacatgtatgctcacctgaatcaagctgtataaaagagagagtgtgtgtctgtcgtttatgtgtcaaaaggatcacctctaaagggcctgaaagtttgatcaacgtaggggccttctccccaccccaaggtcttgctcacttcttcctctttagtaaagtagaacttgatgaagtccttgtaacttttccttgaactaaccagacattggcagctgtgaatacacagatatgagtatttcaacgcactgaaatttaattaaactgccttatacataataaacactcaatgaatacacagtgaaccaatataactgctaaatacctactgcatctctaacatgacatgaggaatacaccatgaagagagggcatatccctgctgtcaaggagctgataatcttgttgggacagaccaggctaatccaagtgtcaatttatggacaattgagacaaactgtcaccaagtgctggaaagctggtaaagggttataggtgccacaggtgatcaggaacatctccaattgccagtgttacaaagatgatacacctgagaatagtaaacatacagaagctacctcatgttagtttcaaagattctaaactgaaaacagccttactccatgcagcagacactgttggttacctactagcatccatttcttccttccctgctggcagagtactaatttaattggatgtccacctctcccatgtgagacctaagggtaaacgctaattagtttaagagagtggggcaacctggggcaaccttaacccccaaggaacatttggcaatgcctgtatacatttttgactgtcacaattggagaggtgctactggcgtctagtgggtagaggccaaggatgctgctaaacattccacaatgtgcaagacagcccctaaaacaatgatctgagccaaaatatcaatagtgctgaggttgagaaaccctgatgtaggctaactgtggctgcacattgtaagcatcaagggagcttaagtcctcctccaagtgattctaatgtgtagtgaaggttgaaactactagctggagccattcacaataagaccatcctcctgcttaaagactggtttagagaggtatttatatgacctaagtctctccagcaagatattggggagtctactagagagttcatgggacacgtttccttactgttaagtacaagagacacaacataaaataaagttaattagcttctgctgaacagtaatcatttctttggcatgggatgtccagaattggcacagccatcttatgactgtgagacatgctagctgaggataacccacatgctgaggacggtgaagggaaagatgagcctcttattattaaggggctacagatgcgtcccttgggacttgggacatggagtgattcctttttatttttttaaaaattgtttagtgactctgggatggcttttctgcttattgcagccaaaagcatcctaattcacataatgctagttgatatgttttgtgctcttaaatatattcacatactcatgtggtaacagtcttaaataaataactggggtctttttatcctgctgtccccttggccccaagctacttcttatattttagaagcatcaaaagtagaccataaaaatggtagcttcaggaaaggggaaaaatattggtgggaaagaggcaggggattatttcaatttattcttagatatattttgttcaaatatatcttccataagaaattataaattagccggacgtggtggcgggtgcctgtagtcccagctacttgggaggctgaggcagaagaatggtgtaaactcgggaggcggagcttgctgtgagctgagatcgcgccacactccagcctgggcaacagtgtgaaactctgtctcaaaaaaaaaaaaaaaaaagaaattataaggttggggggcctgaatgatattggtttactgaaccaaacagaaaggcatacttctaataaacaaacttctagaattctacagaataatttttttggatcagagttatatttgctttaaaagcattcttatttaggcatttgcttttcctatagcatctcaaaaaacagcctatcatacctactacagatgtagtatttcaaaggtatttacttactctcaaagttcatgatctgaattctagagttacatacatgattacctgtaatctgttaagtaaatggtggataagctggctcactttgctgacaagatgattctgattaagaggtaccagtcggcaagcctggacaagaagagcactaacgtcctaccaaaaaaaaaaagataagaggtaaaatacttattagtcaagtgaagatcctcaaaacacagccaaatgggaaaataaaagtaaatattcacattcaaaatggggaaagaaaatgtgaggcaggaaggaaaaaaatgaagtgatagcacaaaaacagcatgtgctaaaaaagaaggaaaaagccaggcacagtggctcacacctaatcccagttcttccggaggtcaaagcgggaggactgcttgagcccaggagtccaagaccagcttgggcaacatagtgagactccatctctacagaaaaaacttttttaaaaaaattagctggatatggtggtatgtagtcccagcttcttgggaggctgaggtgggaggatggcttgagcccaggagttttaggtcacagtgagctatgatcttgctgctgcactccagtctggatgacagagtgagaccttgtctcttaaaaaaaagaaaaaagaaaaaaaaaggaaaagaatcagtacggttttggtcaggctgaagactctgtgctctctatatgtaaagacagtataattaaataaccagaaaaaggcttctagggtatgaaagcacaaactgaagctaaaaatatcaaaaggtaagtgaaccagattttcaatgccattgggaaaaatcagacctaacacttctatggattttatgcataattagggaattcttaaaaaaaaaaaaaaaaaaagagggacctatttgcaagtcacactcttcatccatcgatgtttatagaatgacaaggttctgagcacctactatgtgtcatagtgtgctaggtctttgggctccaaaggtaaaacaaacatgttcctgaacctcaaagagctcacaaactagtgagagagaaagaaacacaacaaataattaaaataaggtgaatcaagtgctgaaagaataaagtacaaactctgtccagaaacagtaattagggaggccttgtggaggtgactgtaaagcagaatctggaatgatttgaaggatgaggagaaatttgccagatagggcatcaaaaaacactgcaagcaaagtggacagagtatgcaaaaacctggaggtgtgaaacactagtaggtgcctgaagaacagcaagttttaaatggctgcacacaggaacaaaagggggagtaacaggagagaatggaagttttgttgcaaaagtatccaattacacaaatacagcaaaagtccccgactactgccttaatctcactctgcttcctaatgacatacactattattctgtagtcaattctttcagaccttttactttgcatatataaacacacatattttaaaatccctcctccagcttcatactgatctcattctgtatgaattgtcctgcaacttgcttcaaccatttaccaatacgtattgaagacttttccaaagcagattttaaagtttatgaacaattttttttcctcctaaagaaaagatcattctggcattggaggaatgactggcttggagaggagctagacaggaggcaggagatcagtcagaggggatcagcgaacagtccaggcataagtcgccttgcctgaggtctaaggcactcgctatgggaatagacaggaggggatgaactgagaaatatatatgagacacattctgaaatacctgagttggtcaggatctgggatgaaggagggaagaaccagtgtttgtgtctggtgtgacttggtggatgatgcatgtgtgttggaaggtgggatggactggggacgggaatgcgtgtttggagctaatgaatttcatctttaggaactgtctagtttgagatgcctgtgcaagcaggcaacttgcaccacttccctctttcctacgtagggccagaaggccatggtgtcaacagttcagagaattcattaatttaaggcctgatgtgtgtaagattactcagaaagacggcagaggggaggagctagtgtgtaggaacagaaaacataggggctttgtggcagagttttgtatactgtatttttacgagcttcagtattttcattagcaaacaagccctaatactacgcaagttctaagattcccacgtggtccgtgtaccatgtacgcaataaacagtagtaatgcattttgtcaaccaagtgttctgggtgcacagagagggagtgaaggagggtgcgggcggatggaaagttggtatcagagaggaaacccgaggcattatcagagcaggagtcgtcaagttgggttttgaatgactcgagcgtgccaagcactgcagggtcttccaaatggagaactaagaatgtgccaaggttggagggggcacgccatcctgaaactaaatcatcaggcgcgagagtgggaagatcagggaaaggcaggcagaggccaccagctgggttcccggaggggtggggccggggccggggccagcagggcgcgccgcctacctccggggccacgccactgccctcgctgtagttctcggagatgagctgatcgaagagcaggtggatctcggtgcgggcggagctgctgtcatccgggcgcagggcgcagagcctggcagacaagaggcgaaacccattgcctcgctcagggattgcttcccgcggtgcctcccgcggctgcacggaaggccacgaaccgacaacttgcacagcagccatcttttctacgggcggggggggtgggtggggtgatcccagggaaatacttccgggacatcctcccgttccgcgcgctctagttccgaaagtaccttttttagaccggactggggctcagaggggtttccatgactacgggactcctccgaccggtaccctgcagatgcttgtcagaaattggcttggaggccgggctcggtggctgacgcctgtaatcccagcactttgggaggccgaggcgggcggatcacgaggtcagaagatcgagaccatcctagctaacacggtgaaaccccgtctctactaaaaatacaaaaaaaaaaaaaaaaaaaaaattagccgggagtggtggcgggcgcctgttgtcccagctactcgggaggctgaggcaggagaatggcgtgaacccgggaggcagggcttgcaatgagccaagatcgcgccactgcactccagcctgggcgacagagcgagactccgtctcagaaaaaaaaaaaaagaaagaaattggcttggagatttttcgccggccactccttcttgagccctgactgaaaagtgagttctcaatttgtgcttccagaaagtttgtcctcccagagtttgttcctggacagggctgaaggtactctgttccgtactagagtttcagattcgggctggagttggagagggtatgctgtggatggcagtagcagaaaccgctagttctaaggcacccttctactcttctaaaatctttccccaggcacaaaaccacccggaataaaggctacgttccctagcattccttgcagttggctgtggctctgtgattgcaatctggtcagtggaatataaggcagctttccctacttaagtgacagctggctgtactcttggttcctttttctccctttttcccagtgtgaatcctctcatggatcatgaggcacctcgccccactagaagagtaattttggagtttaactgaatcatgtaaaatataatctgcctaagagtgaccgggttgaaatgagacaccccaagattttctgaaaccttgaagtcaagaagctggagaataaaatggccatttaaaaatctgtgatcacttttcagtcatccaggaagtgaaggcttgactttcacagttgggcagattgggaaaaccatctctagggcctttgagttatgcaaatataaagcaaatcctcacccttggcccttagggaaaaccttgaagtcacctgaatgtatgttttatcctgagaacaaaacatttctgttcagcagtgaaaattgggggtatgctttagcagaggtagttttctgaagactttgggcttggggagaaatgttaatttttttgtttggatttagattccgttgtgctggtatattatttcttattcctagtctgtgtacatatgtgcgttatatatgtgcatgtgtgtgtgtgtattcgtgtaaagaaatgtattcaagcatttgttcagagaagatcaggagctgaaacctagtcgttggatattttaatctgggttccctgatagcagagcctcagatgaggttgataggtgagggatttatccagaaatgaacagggaaggaaggagaattaataccaatatgtgctattgagttggccattgcaaggggtgactgattgttcagtcctcaggagtttctgagaagccttgtgaagctctcaaaacccttcttctgaggaacagagaggaaaagcatttatctgtcagcttttgaagtctattgtcaaaagttgaccacaaggcattaattcactggtgttcctgtgttgagcatgcatctgtgcttggttcctggaggagtcctatgttgcatagtcaaagaagccctgaggcaaaagtgaggaaactaggtgcatatctgaggcaaggctctcaccagttatacctgtgctaagctagtagatgcctgtgataaactagttgctgtagcaatggctagagtaagaatgtaagaccaagagtatgtgaagtagtactaaagagctgtcttacacattgggctagaaggatgtgaggcctggtcatttccacaatgcacgttcgaagagactggaaaggatctgggtttggtgtggttcactttaagttgcaatatggatgacctacatattgtgttattcagggtggaatggcccaggaattgtaaaatacagtatactgatgccggtctgttcagttctggtagaatatactgttttggatcagtgtggttcctttaaggaaatggacatccctactctgcagtgatcaccaactgaaggaaacgtatctcaagctctgagggaggcctttgaaggcaccctgcattggcttgagtttagacagtagcactcctgctcccacctcccaccctgaaactgtggaaacacagcatggcaaaagctctcttccaagaaaatcttctgtctcctcctcaattctctgcattttcatagtcctgcagtgactgaggggctttaaggggtgctaagcacgttcacagccatttcctttgttagattctgcatcggatgatctggaacctcagtggaatttcactcctttcatgtgtggaaacctctcaagacttcacttttatcccttcatgagcgtctgggtcatcctaactcacgtaggcttgcatacccccacttcactctaattcacatctttgattatttccttcggaaaatttaccataacctgcagttatcttgtttatttgatgactttatcatctgttttcccctctagaatattaactttatgaaggcacagttcccgtttgtctcattcgctgttgtatcccagggctagcacagcccctgggatgtggtagatgccccacaatatttgttaacagaatgaatgaattcactaattttttattcagggtcccctatttgccaccggttgatgtgaaaatcgaatgggatttttgtgaaaatgctttgtaaactataaagttttataagtcttagtatcaaatgaggtagatattatttcccccttttatagttgggaaaatggtgccgaagagtataaatggttggtcaaggctgcacaggcagcaaattggttgaaatcagattgcagcccaggctggctgtgattgtgaagaacatagacaagaaattataaacccattgttttttacctcccacattttgtaatggggaaaaccagaagacaggagcttgatttcggtatccagattacactttgaaccaggagaggctaggaaggaggattggccttgagttctgtttcagggtcatcagcctatctatgtgattacataggagtccccccttatcagtagtttcactttcagccttttcaattacccgtggtcaatcacagtatgaaaatatgaaatgcgctgggcgcagtgtctcatgcctgtaatcccagcactttgggagtccgagacgggctgctcactggaggtcaggaactcgacaccagctgaccaacatggtgaaactccatctctactaaaaatacaaaaattagccggacgtgttggcacacgcctgtaatcccagctacttgggaggctgaggcaggagaatcacttgaacctgggaggcagagattgcagtgagccgagatcacaccattgcactccagcctgggtgaccaaagtaaaactccgtccaaaaaaaaaagaaaaaaaaaacgaaatggaaatttccagaaataaacaattcatacatttcaacttgctgctgttctgagtagcgtgatgaaatcttgcgccatcccacttcattctgcctggaatgtgaatcatcccttagtcaagcatatccacgctttatatgctacccacccgttagtcacttaataaccatctcagttatgagatccactgtcccagtgcttgtgttcaagtaacctttattttgcttagtggtctcaaagcataagagtagtgatgctggcatattgttatatttgttctattttattattagttattgttaatctcttactgtgcctaatttataaatttactttatcataaggatgtatttataggacagaacacatatatagagagtttgatactatccacggcagtatatgtagagtttgatacgatccacggttttgtgcattcactgggggtcttgaaacatatcccccgtggattaggggtactactgtgttaataatcattgtagttaacacttactgaatgctttctatgtgtcagcactttatgtgaccctctttaatctttgtagtttcatgaggtactattatatatatgagtcgaatcacagaaagatgaagactctcactgaaggccacatggctgtgtggtgtgcctgggtttgaaattcagagtcagggctcctgaccaccatgctataatgcataggacttatatggcgttcgacatgagattatagtttaggccctgacacttacctgctatatgactctgccccaaacctcagtgtcctcaaatggtaatgataagaagtgcagtcaaaaggttgttaaggttacttagataatgcctggggagaatttaacatggtccttgttgatagtcagtacgcaacaaatgtcatctgtcctcctccccctcctcctcacctttaaccaaataactcaaatagtatgagtgcttttaacaatgatgatttattaaaagaaacaacccctcttccctgcctcccatatcccctgtagtctccatccacaggcttgctgttttcatccatcttcctagtcaaggaactccagacagtcacatcttggaagataggaactccaggaagggatgacgatcttagggaaagatgatccttaagataactcttcatctgagaaaaagacaaaaaaaattttgcccgagacctgctgttttggggacctggatccacagaatacaatcaagaggcaacagttcccaatttgggaaatcaatcacacctgcaaagagccagccaggccctaagcagtccaaggattgcaggtggattggccaaacaatacattctgaacacaaagggtttttatttaaagtgtatgctgattctgttgtgtttagtgcaacttagtttataatcaaaactggtagctttttattatgcatttttcaactaatggctactgaaaacaaataaattatcctgtgaggcccctgagatattttcacagaaaaggggttctcataagtcaacatggcaatgtacatcacagggttaaaatgaacatactctttatttttatttttatttttattttttgagatggagtctccctctgttgcccaggctggtgtgcagtggtgcgatctcggctcactgcaagctccacctcccaggttcacgccattctcctggctcggcctcctgagtatctgggactacaggtgcccccaccacatctggctaattttttttgtatttttagtagaggcagggtttcaccatgttagccattatagtctcgatctcctgacctcgtgatccgcccgcctcagcctcccaaagtgctgggattacaggtgtgagccaccgggcccgaccaatgaacatactctttagtcatcaattttacatcttagaatttgtcccaaggaagttaataagtgtgtgtatgccaatttagtatttgttacaatcatattcataatatcaaaataagaaatatcttaaacatgtattactaaaggttgctaagtatctgagcatagctgatgaacttctataggttatcaaagatgatgggatagaagcattagtattgacattaaaagttgtttggtagctacttttaagtgaaataaaaaataaaaataggcacatgattatctcatttttatataaatattacatatttgtgtatgtttaaaatatgcaccaaagtgttaagcagacattgttttggggtgggggattatgtgtgatttttatcattttgcttaagtaaatagtccaatttttctccagggcatactgggttagggaattattttaaaggtgtggaaaccaccagcctgtgatggatgcatctttttcttgggaagggtgggggaagagggagacaggtaggtttctgtcctactcatttctggaaagtcccactgagaccaagtgcacaacctacctagactgaacaacgtttcagaaagcagggagggcctggtgtttttacctgtccttaccctgcaacacactcatggccacacccattgctgacacagtggtctccggggttgcagtcccagtcacctgtgcagagctcgacgcaggtacctatggaagaacggatgtgctgaaaaccaccgtacttttgggacagatgctagggagaacagcccttgattaagaagtcagttctacatttttcttttcattcaatatgcaatatgatttattacttgaagaataatatcattaacatcttatatattctagttaaaagcaatgcattcacataatctcaaaacagtaaggccgactttagagatggggataattgtgtttgtggaggggaagtgcagagaaacccacttaaatgtcttcactttccccactctgcagggaatagagtggagaagaagagactcacatttaccatgtgccatcgggagacacttgcagtcaccccatgcagtgagtcttactaggcccactttacaggtgtggcagttggggctcacagaggtgacttgctagccagtgggtacagaagtgagattcaactgagatttgcctggcccctcagtctgagcaccttctgctgtcccacatggtgaagctcatcctgacctaggtacatatctccaaatttcaaggagtcattctggacctgattggaggctcccaagttcccagaacatcaagctctttgaggaccaatgaagtaggctcaaagagttggttaagatcgcacaggcttttaggaaaacatatgcagaactctggatgaatatgtactgtactttgattggctactcagctattagcaggaatttctttacctgattatgtctctgggtctttctggaacttttctcatctgtaaaaaggggcccctggattcagcaggggtaatgagttttattctccattgtcaacttcagtcaatagaggtggctgtctgatgctgtgttgagaagggtcagacaccttgtccaggttcaaagagaaagagtgctaggactgattagcagtatctgaggggtataagaaggggacctggtgggatatcttcaatgtagttgtagacctcagagaaaatcagtaccatccccccatgcttcccgtagcttttgttgatttgtggtgagcaggctgaagattcctcttccccactcacagcagtttgacttattaagtcaataatatatacttattaagtatatgttgatttcttactatgtataaaatagaggaaattatccagcaaatacaaagatataagacaaacaagcttagagtctaacaatatggataaaacatattcaaagtactaaaaacaaagcaatatgtaacaagtgtcctaagagaggtatatctgaagaattaaagagtctcagctaggcatggttgctaatgcctgtaatcccagcactttgggaggctgaagtgggaggatcacttgagcacagaagtttgagaccagcctgggtgatacagtgagacccagtctctacaattttttttttttttaattagccaggcttagtgtcacatgcctgttgtcccagctacttgggggactgagataggaggatcacttgagaccaggagattgaggctgcagtaagccatgatcatgccactgcactctggtctgggcaacaaagcaagatcctgccaaaaaaaaaaaaaaaaggctcagagaatatgacattacttccaattagattaatcagaaaaggtgagttttgaagtgcaggaatctttttaaggcagaactgaggggcatgggtggagtgttgtgagaagaaagaagaattactagcaacagttcacaaggggaaatgcaaaagggctgggatgagggtgaggcaagtgaggtgccttgcacaatgctggcggtgagcacccatttcatgtttgcaccctgggtgcctcatccacttcactcctcaccgtgaaacacaaggaacacaggaggagtggcagatggagggctgggtaagtgttagggaacagctggaaatgaagcaggaaaagtaagcaggggataaagttacgggggttggggggcagatctcgagggcctcaggagtttggatttcatttgatagatcaagagagagatgtgattgctgtttaattaggaagattattctggtgtgagagcctagaatggaacagaattcaacaagcaagcaaactgctgcagaaagacaggggcagggagagctattaggaagctccttggatggcccagacatgaggtcatcggggctggaaatactgcgtgacaatgggagatggcagggtaaggaaagaacatatgcaagagacactctcagagaatggacagtatttggcaaccagtttaatgtcaggggaaggagagcaaagaagagaggaaagtaataactgaatccaataatgtttagagagaagaataaaataccatgaaggataatacaggagaaaagaaagtttgagaactgaggaggtggcgagcagtgtcggacactacagaggttaaagacttggtgactgaggagtcatgagatttgtccacaggatctgggagagaagtttcaggagagtgatggggcagggatggaggctgtaggccatcttcaaggggtcaaggaataacttatgggggaataagggcagagaattaagattactcctttgagaatgttggtaaaaggaaaagaagagattgagatgattaatatttaacatgattcagaaaatattttctctaggtgatccaatttacttgtagcaagagaggaagaagcttatggagagggagagggcaggagtcagagggtggctgatgagggggtaagaggggaggtacagagattccaaatggagcggtgacccagggaaaggagtgcgggaaggtggaggtagaagaaaagagattctgctctggggagctgagtagcggcagttggagggtccctgcagtggccttttaagaccttttcttctttcctttcttcccctctcctccccacacacactggtccctgatgtcctactttctggccccctcattcaaggaaaaatgaacagggctaccttctgcctggactcacccaaaagccggtctcctgcagcctgaagctcttgtacctctaggctgaagatgatgaggatcacaggaggaggaaggctgccaacttcatgttgctgttggaaggctttggaaaaacacagcagggctgagagcagctgaaatttataccttccacccgctgagctggaatgcaaggccaggggtgggactagggactgcagacacctaagccctgcccagaaactgacatttctggagaatagccacccaccctgtgtaccctgggtccttctacattacctaagcaaggctctgagccaagggaacgccctcctctgacagaaaaataagactcctacaccaggccagttgcagtggctcacatctgtaatcccagcactttgggaggccaaggcaggaggatcatttgagcccaggagttcaagaccagcctgggtaacaagagcaagaccctgtctctacaaaattaaaaaaaaaaaaagttaaataatgaaaaagactcctaaatcaaaaaagctgtgagtgactgagaaaaaggggctggcgtggggagggtggagggatgagtattaacttttattatgtatattcattcactcattcattttcaacataagtattgaatgtctgctctgggccaggcgtgggctaggcatgagagaatcccagagaaattacagtctgggagctaggtgccaggtagcaagggtgcagtctgctctttcccttcttcccccgacccaccacacccgcccacctccacccccaacttccaggcctagcacctctggaaatgagggcagggaaaagcagtacagaacaggcaggggtgctcccttatcacctgctggtggtagagaggtggcctcagtctcccactgccttggtctgattctgttgctggatacctaggcagatgtgatggtctttgcctataggagctatgtaattttcttgagataaagctctgcttcatctcatccaacttcatttctgagaacccaaactcaagttatgcatattaaactcttctaggatatctctcgtcctgcagctctggggtgggagtgggggcgggaccatagtaaccaaccagctggggagtgaggtttcatttccccctccttgtagcactcctaatctagatgaatgattttcttaaacacacactcccgttgtttttttttttgcaggggagtggggatgttgtcaggggtagggagaaatataccctcttccctctccaatggcaaggatgcagggagacatgtataacttttggccatgtgtcgtgtgtcccacaagataccttatataatgtgagataaggaggatacctgggctagttgagggtagtgagacaagtttgcaaccttgtgataggccccctgggccactttctaaagtgaagtcaactttagacttcacttgtaagtctaaagtacatgatgtttcacttctggttcctaactctgaggttacagggagagacccactctgttctacttcatgtatcacagttcctgaaatgccattggttagaagtcctttgggcaaacaactgaccttttctgcaaatccttcttatctaacaaggcccagcctaaatgtcacctccaaaaccttcctcaacttccacccctaggagagtaacattctctttagtacttattttgtcataggacttgtcagactctattgtaattaattattatgatcattttacatttctctcctgtatcttgctggctagcatggggtcttactgatctttcatcctcagctctcaataatgggcatttattatcctcaataatgtgtgttttgggatgatgaggagcattcagagagccattgtaattaggaagacacttcacgtggtttccaatacagacaggcattattattgccacgttacagttgagaagattaagccacagaaagtttaactagccccaagtaatagttaaatggcagaaccacagtcaaactccaaagacagtggtctatactagtacacattactgtcaggctacatccaaattcttagaaaataatttggactcatctctgggtacagataaatgagcttttgaggtcacagaattctgcttcatctagtgtggcacccgtaatcacaatttcattagcacaaaataactgctttgagctaagcaactcactctagaggcttctgagtactcaatcagattaaaagtaggtgccatccacccaaaactgttacttcggttttaagtgagttgaggagcagcatgtggcccttattgctggctgtttactaaggccgtttcgaggttgtgaaaacaagcctgatccgagtatagcacagtggcctgagagtgaggaccccggagtgtgacgggtctggttcgcatctgcttcactacttgctagctgtgtgaccttgggaaaattaacttccctttctgagcctcacttctcttttctgtaaagtggggagtataattcctacttcaatgttggacagaccaaattacaatatgtgtacacatacatacccctggcacagggccctcaacactagcagctactattgtgaatttctgagaaagaggatgcatgtctttctattccctagagcagggcatctacagacagctcatgcaaaagtgtataatttaattaaggaaatatttcaagataaagaaaactcagaacctgtccctattttattctgctggatattgtaaactgaaccatgaagagactccaaggctgaagctagtattactgtcacttccatggctctatgcgggctcatgattcccatatggaggtcaggaagcttagtatgtgaccaattctgcctaaagagtcattagcaagggagggtcaataaagtcacaatcttatataaggcatgcatccttccacctacacctcttcatcttgtaccagatctagatagtgtctcaggtaagcctaagaatctgagctcagaaatcagatcacctggactcagatcctgactccaacttagtagctgcatgactgaggacaagttatttaacccaacatcatgttgcttggggaagtttcctttgatgacaacacagatgggcagagatgggctatgatttatgtcttccctcccagcatgtgcatcctgggtcatgacacaggtatttggaagcttaagccccagtaggaagctgacctttctggattctatagacctgtgtttagcattaagtattttcaaaaaagctctctaagccaagggaaacagcttcttctgcctaataattaagacttctaaagaatggtggccactttgaatgacagagagaaatggggcagggagaaaggaactggcatatactgggccagttccttctgtgtgccagattttaccccccaccccacatgcagatctcctatcgctaccccctttaaagatcaaaaacattctcagaggttgtcttcatttcacacacgaagagacagtagtttgcccaggtttacacaacttaattccccaagtctttctgatttcaaatcccaagctctctccttcacatgacactgtttatgacttttccttacacacccctgtttacctgattttagatccaaatattaatattacagggctcaggtcttggcctaggaacaaggactggcatcctcttttcttcttcccccagtcttcacagaactatctagaattcctcattcagtcacactgtctgaaatgttaacaagtagagacttcctagggtaaaaagcctcctggcacattcagatgtagggaaaatcccatatttgattataataacattttacttcctctttccaacttgaaaaaaaaactcaagccttcttgtattacaggttctcagaaatgttgatccatcttttgtatctaagtttttatttctccttttgcaaaagctgctctaaataccagctttgctgctccgtaggctctgaatggtcagaagaacattcacattacgaggatgactctgtggaatgcttgaccactaagtttggtaaatagctggtcagtctttttcactttagccacagctggggaggaaagcctctatatgagtggcagaggctggctggctgtttaccagactcatttcttctttctgaggacacagtagcttacatttcctagctttctttgccattggtttgctacagccatgcaattgagttctagctaatggaatatgagcagaagtgatccactccacttccagtgtgagacccctaactcccctgctccccatgcacagccttccactgtcttcttcctattgctggcatgaagcacataagcaagctatcttggaagccatgtgttgaagctggtgaagactacaagatggaaggagcctggtcccagaatcaccacttggaggaaagctgcttgctgttcaagtactccagttttggatttcacacagggagggataaccagtaagggataacaagttaaaccagcaagatttgggtttctgaccccctagttgaccaacagatcagctgacccccttctgatcccctagctgactgacagattcatgagaactactgggggaacccgcccccagtatttcagcgttggttctttctattttccataagtatcagccggctgagaaataatgagaaagagtacaaagagaggaattttacagcagggctgctgggggtgacatcacatatcggtaggaccgtgatgcctgcccaagcctcaaaaccagcaagtttttattaaggatttcaaaaggggaggggatgtatgaacagggagcaggtacaaagatcacatgctttaaagggcaaaaagcagaacaaagatcacatgcttctgagaaaacaggacaagggcaaaagcagaactcctgataagggtctatgttcagcggtgcttatattgtcttgataaacatcttaaacaacagaaaacagggttcaagagcagagaactggtctgaccataaatttaccagggccgggtttttccccaccctaataagcctgagggtactgcaggagaccagggtgtatttcagtccttaactcaaccgcataggacagacattcccagagcagccctttatagacctccccccaggaatgcattcctttcccagagtattaatattaatatcccttgctaggaaaagaatttagcgatatccttcctacttgcatgtccatttataggctctctgtaagaagaaaaatatggctctttttgcccaatcccacaggcagtcagaccttatggttgtcttcccttgttccctaaaaatcgctgttattctattctttttcaaggtgtactgatttcatattgttcaaacacacgttttacaatcaatttgtacagttaacacaattatcacagtggtcctgaggtgacgtacatcctcagcttacgaagataacaggattaagagattaaagtaagacaggcataagaaattataaaagtattatttgggaactgataaatgtccatgaaatcttcacaatttatgttcctctgccacagctccagccggtccctccgtttggggttcctgactttctgcaacagagaacaattgttatttcaagccactgagctttgggacaatttacttttgttgcagcagctaattaagacaatgcagattctcattggagaatctaatgattcaaaagtcagttagaatggctgacattgacaagtcagcctaacctctttcttctaccaacaccatcactaccaccactgctgccgccctccactgtactcctaaagagagtggctacttttggggattcttaatttcttgaagtcactgtgtgaaggccaaagcaactccatgttgtaatctgccatgttgccttcagattaacctctgctctgggaaggccattaaaatttccagtttgtggccgggcgccgtggctcatgcctgtaatcccagcactttgggaggccgagatgggcaaatcgcagggtcaggagatcaagatcatcctggctaacatggtgaaaccctgtctctactaaaaatacaaaaaaattagctgggcatggtggcagacgcctgtagtcccagctatgcgggaggctgaggcaggagaatggcgtaagagaatctgggaggcagagctttcagtgagccgagatcatgccactgcactccagcctgggcgacagagcgagactccatctcaaaaaataaataaaatttctagtttgtctgttattccttgtgtaacagcacatacttactgtaaattctgctcttaggtcaaaacaactttggtgttatcatactttaattgttctacacatcacttctgaatcatgtatgcccttttcctgtggtatatcagccctgggtctgtggggtaatggtgcagggatccaccatctcatctctccaccaccagagacacagacatggcttctgtttgtaggtccctattaaatgttaccttctaagagataggatttgtcagcctctttcttcagcctctcagcttccttgtactttgggggtaggtttgcatagacctgcctgccatggaacaattataaatttttttctgaaaaaatggcagtgttatagttgtggaatactatagtcatgttacatttaggaagtgccagcccatggtgtatttcagatgtaatttcattccttcctattggctggtgaggccggaagactttggggtgacatcattgtgcactttgttggcatagaagaaggtaatatttgtgagtcttggggtttcagcatgaaactgagaaagggaagttcagtgaagaggagaaaaagggtagagtggacactttttttttggagttggaccagcctgaagtaagtaaagatttctgggccaccaatgactgtccattgcacagatccaagcataccagtcagaaagcagccacttcccagggagcatcatgtagattttagactccaaggataccacaagccactatcaggtgagaggtgcaattgttacaacccagcatagaggtcccctctttatttctcaaagttttgggagaacccaagacccatagcctttattttagggactgtttaatcatcttggcagagaaagagactacgtaattgactcaggtcatttgagatcttagcattaaccaagatcctgtaacacaggcagatttagcccttttgtttctatttctatatttaatataaatttatattaaattcttgcaaaaatttagcttttggctaaagtcagcttttggccacagctgttgatcagcagggaaacagaaggagaggcctctgatgtcagtaagggattttcacacttagcaagcaactcttgtggccagttgcacaaaagcagagttgtagtgagatatccaattcccattagagaaataagggagctggaactcagagaacataagtgatttgctcacagtcaaggcttgtgagtggctgtgctgggactggagtcaggcgaacatggccctgaggtccatattgaatagaaaccttctctatgattcctcaacagacacacatacccatgctgtttcaggtccactctcaggttgcttctgctggggccttatgtgcctgagggcagaaactcataatcatttgaggacccacaaggtgttgcagtccagcatgaccatttcagactccagcatgatatttcaaaccatatagggtagcatcctaccctatatgattcctagctggggcccccatcaccagggaaatggtgctggttctcacccagaaatagataaagaggaagtgtctctgctgaataagaacaggtatgcatgcctatcccgactccctgctccctgaatgaagcagggcctcctggcatcgcttgatgtttgtgatgctatccccggttgcattggcagcagccaacaccagggttttccagtggctgaggtccaacacgtggttaatgtcattgccttttcctcccttccttgggatcaggggaataaatgtctcttacttagaactgttccacacagacttagagtgacagagaagtaatttaacctattaaaggccattttgagcaaaaaccaccttgtgtcactgaagctgtagaactgagccacaggaggaaactgttaaagtcgcagggtcaaggacaaggtacctatgttatcccgatggcatagaagcacagcctgagtctcttctttggctgagccaagggcgtgctggagaggcctgagagaagaaggaacggcccttctgaccagtgcccttttggttcacaaggaacgtctcctcttgtttaagtgatttggctgagcttgctacttctgctttgagagtcaaatatcaggatcaagactttaattatccccaatttacagatgatgaaaccatattgggcaggaaagaaagtcaccgcaggagagcgagttggacctgggcactggctgaggacaaaggggaatgataatttgggatgtagcttgttaaggggcctcccaagtgttcttgtgatccaggtgtggagaggatagagcagaatggttgccagggagatgcaggtagggtgcactgcaagagtgggagaaattaaagagaacatgcaacaaagccttgggacagcgggagggggatggaccaccctgttttgtgctacgagagaagagagcaagaaaaggaatctgtgttaaatcccgacagcctgcaggagaagcaaatgcccttccttttgttcatcagcagtgagactggcatccctgtagctttgggaaactggccagtgtggatgccagctccctccagcgggcctgactgggagaccttgggctggggttctggtctggggctcctaggcctgatgggaggagagttcagcccaggtttcctgtgcttcagctcgtatccagatgatggtaactattgaaatgagagactcaaaagaagctggaaactgcattttttgttgtcccatgtggacacctgtgttcagttcctagttctacctcttgctgtctgtgtgttcttaggtaactgacttaaacctttctgagtctcattttcttcatttatgaaataaaagacataacacttatgtcagatattgtcctgaggattaaatgggagaatgagcaagactcttctgcattccccttgcgtccagtgggtggaggccagagaagctgctaaacatcctgccaggtgcaggacagcccccatcacaaagaattgactggatcctgatgtcagtaaggcagaattgaggatccttggtgtgggggaaaaagaataaactcggaagcttggcagatctcaattcaaaccctggttgtaccacctctagctgagtgaccttaggcaggtctatgaactctctgagacttggcctcctcatcgataaaatgagggagataaaactaccaagctcaccagaaataaccccatgcatatatggtcaactaatctttgacaaggtcatcaaggatacacaatgtagattcttttattcctttactttcttaataggcttcctttcactctacttttacaaaaaagaatacacaatgtagaaaggaaactctcttcaatgaatggtgttggggaaagttcctgcaaaagaatgaaattgcacacttgttttacatcatatacaaaaaattagctcaaaatggattaaagatttaaatgtaatatctgaaaccatataactcctagaaggaaacatagggaaaatatcttcttgacattggtcttggcaataatatttttttgccataacaccaaagcacaggcaacaaaagcaaaaataaataaatgggactatatcaaacttaaaacgttttacatagcaaaggaaacaatgacaaaatgaaaaggcaacctatggaatggaagaaaatatttgcaatccatatatttgataaggggttaattatataaggaattcacacaactcaatagcaaaaattaataaatacataaataacccaattaaaaataggtaatggacctgaatggacttttttttccccaaggaagacatacaaatggccagccagcatatgcaaaggtgctcaatgtcactaatcatcaaagaaatgcaaatcgaaaccgcaatgagatattgccacataggataggacagctattctaaaaaagagaagagataacaagtgttggtgaaagtgtggagaaaagagaacccttgtacactgttggttggaatgtaaagtggtataacctttatggaaaacagtatggaagtgcctcaaaaaattagaagtgaaagtaccatacaattcagcaatcccacttcaggatatatactccccagaatggaattagaatcttgaagagagatctgtgccccatgtttattgcagcattattcacaatagctaagatatggaaacatcctaagtgcccatcaacagatgaatggataaataatatgtatataaaccatggactattagccattaaaaagaagaaactcctgtcatggataaacctggaggatattatgctgagtgaaataagccagacacagaaagacaagttttgtatgatctcacttctatgtggaatctaagatagtgaaatgcataaaaacagatagtagaatggtggttgccaagggctgggggtggggaaaatgggaagctattaatcaaaggctataaactttcagttgtaagatgaacaaatgctggagatttaatgtacagcataggtgataatggatgtaataaatttgtgataattagtacacaatatatacatatatgaaatcatcatgttgtatgcattaaatatatacaatccttgtcaactaaattttttttaatttaaatgcctaggtcataagaattctgagaattaaatacaataacatatatgaatgggcctgctatacagaaggtgctaaataggtttgttttgttttgttttatttcaactctggcagatgtagacttattgggaaagaatgtagaatacccttgtgcacaaggattatctatatgatgactaaatatcctgcatacatgccatgtcatttcttttttttttatatgcaatacttttattttagacatgcaaggaaagctatttcagaatctactaatttaaagcaagcagctgtatacagacagcaaaagaagcaacattttgttacagcttagcacaaggcatccaacgcaaacagacatgagacaatgcatatttatgtagcattaaaaccagatgaataatatattatggggcaggaggaggaaaggaggggaaaaatagaaatgaaagaccaatgtttctcaatgcttccaatatataatgctaaatttcccacctgatagcacatccaggtgcttcaaatgtagtgcattacagtgagaatgttaagaatggaaaatcttatctgtgtacctgcctaatactaagtttggtcaaaacacattttcatagatcttctttcagtggtaaatcgatttgaacatcttgtgaagttattgtttaataacttacttaacttaggctttatgctgtctatatataaacaatgaattcttttccttttataaaaaaatatgctgcatgttttattaaaagaatatgcaatagttaccaatattaaaggttttaaaattcagaaatataatgccacagttaacaaagtattaagtatttaaatgaggacttaatatattagaatgccatcactagtaaaatataagtatttaggtattaaaactgaatgaatattagaatttttgaactatataaactcagcattaatgctttgaaagagttattattcagcaacagatactgcagaacagacttcagacatagctctctaataagttcttaaagggattgtttgatattattatatagcacaaatgtgattcaataaatgtggcactacaaaatttcttaatactgaatgttttaaccttaaatattatataatggtacaaattaattttagtttcttgtaatattttcacatatacttttatgtgatacattagaacacattagctcatacagattgtaagataatcacacaaaatagtttctttttttaacctcaatatttgaagaccaaaccacactatatattatggcactgcttattttgacctagcacttcagctatattttctttggtaaacattttaatgattgtcatgttttcctcttataagataaatcacagatggttcattaataatatgtatatgtttaagatttaatattactcaaaacacttctaggtcatattttatcaagatgagattaaatcagttgcagagaggaatgagctgtatcaagatcacatatagaatgaaaatacagaaaagtttggaatgtgaacaggaaaaaaatacaatcataaaagtactagttctaaaatgttctactattattatacaagacaataaatcaccatgctgaggatattttctttcatatgtatatcagcattctatttcctctgtgaaattctgcatactcgatgagtagtcatttagtacacagggacattaaaatattcatgacgtggctacaaaagaaatgcatatattcttacacacagtatacaaactgacacagacacaatcagatttctagaacatttagttcacagtaaagataactaaaacttaagtttctgtttgctttccttctttggtttaaggctgaatatttaacttctaaacaatgcccaagactttagattcatttttttctaactttactacatacagtgttcaaaatgatgacagacatcctccagaaattttacaaaatcctaaaacactatatttactactaatattatgaaaagattttcagtgtaagtcatctggtcaatactgagttgaccaaaaattcaattagaatatttcccttccaccagtgtttaaattcattagtacatttgtattacataaactaaagaaactagagaaaaatctttcccaaaaaaactggaaaagtagtcactcatctggtattttaagtagcaatgaaggtttttaactgtttacttatacctacaaaagcaaaaaatccaaagaatttgactgagactgaggatattacttttttaaaaatcctcaagacagattttaacaaactctccagatttgagtgtctacagaaggacttctaggggctccgagagttccctgaaattagaaacaaaatgatgtacaaattttcctggggtgacggcccatcatctttcggactctcaaagggattatatccccaccagaaagcaagtttaaaattgcttatttgagtgtctttaaagtatcctcattttaatatttattcaatttgaaactttgaaatattgaactacaaaatcatgtaaactgttccaagaaaaatatctaacaaatccctaaacttacacaaccattaattacaaacgtatctgaggacaaaagccagttacattttaatcctcaaagaattcctaaatattttaaagagatagctgcccttttcccccaactcagaatatagtggaatgaagcagcaagttaaaatcatattagtaagaaattaaactcccaactacttcattttctcacagaagctctcattttcatagggaaattcttctgtatcaatggcattagtgattcacagtatttaatgaatgcttttttgtcaatgaacctctgaagctatttccatattctgtgtaaaaaataaattataagccccaataatggatcattatccaagcaaaattccctatgaaaataccagtttaatgaagtaattgggactatcccttgggatttaatgtaattagacttttcaggtaatgctaaaatataaataacaaacttgacagaattgtcattacaaactgaatgtatataccctactacatttcgatgcgtgtcagtactccagcaggtattctagtacgctttcttaaacccagtgaaactcttgctgtgatacatagtctctgttttctcctgcagtagatcggcctgctcaattgctttaaggacatttttcttggatgtttcctgaacttcccctcccaaaagaaactcatccaaaataaaataagccttctcaaaattaaagatgatatctagttcacagacactgccgaaatacttgtcaagtaattccacataacgatgaattatttccagggtaattagttcattgtcctgatcctcaatagcacagcaaaaatacagactagcatatcttttgtaaacaatcttcagatctcgccactcaaggaagctgcacattttaggtttccgtgctaaaacggtctgaacaagttctcttgtgatctttttcttctctttgtccgatagtgggacataccatttttgcagtcgaagctttccctgacgactaaaaagcaacataaactgcatggcggccgcgggccgcgggcgcggcggagcttggccggtggcggcggagcttggccggcggcggcggcaaaggggaagcccctgtcgccgtgctgaggaagagaagccgtggtgctgtggggaagggccatgccatgtcatttctatttctcattccatgggtaataaaagcagaaccagccttctggtggtcacaaaacattttgacatgagaaaggctcatgatgagcaatctgggaatgtacatcccagagcatgcatgccctttgacccacagctaccatgatgtcatgtctagtaattagtcctaaggagatcatcagagatatgtaaagaaatttcattctaacagcatcctctgtagtgttatacatcaggggctggcaaaccatgtcgggaagaacacagtcatgcccattcatttacaaattgtgtatggcttctttccctgcaacagcagagttgagtgttgcaacagaaacctatggcctgcagagtttaaaatatctactctttggcctttttttttttttttcttttgtgacagagtcttgctctgtcgcccaggctggagtgcagtggtgcgatcttggctcactgcaacctctgcctcccgggttcacgccattctcctgcctcagcctcccgagtagctgggactacaggtgtccgccgccacactcaccacacccagctaattttttgtgtttttagtagagacagggtttcaccgtgttagccagcatggtctggatctcctgacctcgtgatctgcccgccttggcctcccaaaatgctgggattacaggcgtgagccactgcgcccggcctactctttggccttttatggaaaaaagttgctgactcctggtgaatatattaagaaaaagttggaaaaacctaaatcttcaagagtggagaattagaaagtaagacacgttgtatataagacagatagtgtgtgtgtgcatttatttgtaaatacattgtttggaagtaatgttgtcaacatatgttgcaggtcttaaaaattgttcaatatatagtgttaatcaacaaacaggcaaattataaaatgtagacagaatgtgattgtgcattttgtgcatacaccaacagaagagggtgctaagaagcctgtggaccaacatgctaagtgtggctcttttgatggtggtattatgggattttaaaaatcctcttggttttgtatagattctgaccttcctgtaatgagtgtgaataaatatgtgtttctttataaatgtaaaaataactttatcttcccagttctcataattgaaaatgttggaacaaatggtcctgggacagatctttcctttgagaagggcagaggaggggattcagctgggtttctgttgcatttctagtaacacacagttgtgaaaggccagtgttggccattccccaggacagactggggtagaggaggtcaggatttaattacttgagggaccagggaatggacgtggccacagtccttcctgactcgctgttttcccttccacagtccctgtcttctcctcactgatgcacatagatgcctgaccagaggagagatttagttttcatccgaggattatttgttatgttgcagttctgaaattcccataatgtttaaactagaacacaagtgatttcattatctctaatgtgtacggcttgatagaaatatattccattatgtatcaccttaaatccagataaaacataaggaatttctattccatgtttgtatgatcagtgctaataatataaaaagtctaaaaaatagctatttcctatattacagtatgaaataaatatgctgaatgatttgttttggggggtggaaaggtgtaagactgaggagggtgcctgtggggaacagtgataggaatcctttcttaagggttgggttttacatatgtcttttaaaatagatgatatcattaataaattatctgtgggcatcatgaaaaaagtggataatgtacaacttttatgagcttgacagttggtgaaacgcttttctgtttaaaattttatttgaccctccccaaaagaaatgtttattcatgagtattagggtagttccagtagtaatgcctcaaaagaaccaggaggtatagtgttgtctaaaatgtggactcaggagccagactgcctggctgtgcaactagccttgtcacttcctagatatgtggcaagttaattaactcctcagtgttcttatctgtagaatggggataatcataatatacatctcagggttatattaaaaattgaaaaagttaattttgtaaagcatttagaatgatatctgacaaataagtgtgtttataaaagcaaaccctataaaagtgtttactcattaaatacaataatctgaagccattagtgatttaaacacttgtggctgacttgataatatttatgaaaataaatactgtatttataatctttgacctggttttactcctaggagtttattgtacagtaaacattttcacaggcagacaaaaatattactataaaatcatgtttattacatctatctgtgcaaaaggaaaaaacattaggcaaataaaatgacaatcaaaagtggtattagttaaatgaattatagtaaatccgctgattagtaatcatataatccaaaaagaagtaggcatatttatgtgatgtgggaagatccacaactaatgttaaatggtaaaacatataaaatgttatgcccaataaaatactttctgtgagagaatatgttaatttattcaagtggcaccaatgtggagggtttatgctaatttcattatacctcacagacagacctgggctctcccactcattatctatgtggcctgggataagtcatttaactgctgtaagcctcagcttcttcatctgtcaggcagtgataccctgactactctgcagggtaactctgagatttaaacgtgatcatctcagaatatgcctggcaaacagtaggagctcagaacttgatgttttttcctacagcaactgcatgtcttttggggatagcacttaatgcatgaggttggtaaatccttatatacataaaatattgtgaaaacataagtacgtgctaccattttttcaaacctctttttttttttttttttcctgagacagagtctcactctgttgcccaggctggagtgcagtggcaccatctcagctcagctcactgcaccctccaactcccggttcaagtgattcctgtgcctcagcctcccgagtagctgggattacaggcatgtgccatcatgccaggctaattttttttttgtatttttaataaagatggggttttgccatgttggccaagctggtctccagctcctggcctcaggtgatcctcctgtctgagcctcccaaagtgctgggtcaaacctcttatatccagtaaaacagcctcactgggtcaatggatatcatgtggttgcctaacatttttactttataaaaggtcctcatgaggccattcgaaagtatgaatcaaaacgctttaagatgaacagggccataagtttgtatgaggcttctcagtggacctccagatgaagaccaaagtaattacaatttcacatttcatttgtgaacatggccagcagctacgttcatacatgaaacaggacaatgacaacagcaccaggaatagctgcccctggtcagatgccctcatgagcccagctccacaggacagggccaccaggccctgcttaggggaaagcgggggcgggtttgtagaggaagcccagccagccagccaaccagagatgggaaaaacccattgggaagaagttgcttgctctagctggactttgcaaagaacaggaaaagatgaatctggacagacaaatggtcctgagtgggggagcttggccgtgagcgtgactcaggatgtggtcagcagctgccacaccaggacacaagatatgcaaagatgctgggtggttggttcttaaagattttgtgccttgagaaaactaaaggatgcagacgtaggcagaaggtggctctttaaaagtgcttcaggcaaggaggcagtatggcatggtagaaagtggtctggtttttgagttgaagagaccagccttgccatttatttttcaacagatcacttcaccttctgggccctaatttccatgtctgtgcaatgagaatgacattatacttaagatgtaacaggaaatgaaagcacaagtataagatctccccatactttcatctcatccactctaaccagggctgacatgcatgattttccaggttgtgcactgaacaactatgtctggtggccaggatgagtgggaccatcatccatctccagtgtcatttctgaagtgctccaccctggcactgcctacacctagagggagggacacttttcctaaataggatacaggtgctgtctgtttacccatgggactctgtctactggaagggggcgtttttctaattctcaaagaagcatcttttgaactagtggtggtcttcatccagcctgccatgactatctgcattcgaatgcaggctgtttatacacacatttctcaccctctatagagtggaggctatggttttcctgtctggaaccaactactctttagtacaaattggggacaattgtaggcatgaaaacctaatgggactctgtttattctgggaatagggtagagatgaatcctgcctgggatgtgggaaaggaagaaagcctttgactcatccctttaagagaaggggcttttggcagtctggagtctttatcttttctgagttcctggctgacactgatgttttaaaggctaacacaatgtggaagttccaactcccaggctgaccattaactccatcccatgccacaagcaccccaggaagccagggttggaacccagagtcagggagaggggtggcagcccaggctcgcaggagccagtttcctaagcctggagcatgtcaggcagaatcaggcatagcctgtcctgagtgtgctggagctgggctgtcctggaggtgaagaatcatacacagaaaggagcacccgagaaatgccctcaggctaggaggagaaatccacatgactattgtggaaagtgtgggttttggtgtagaatttttactctttgatgatttgagcacttttcatcaccatggtgggccgaggacctgccccagtccccagatattgctccagacaatgagttctgcagcctgcagttactgttttccctcttcagctgctctacttgggagcctggctctgttaggaaggtgcgggcaaccctgttcccccgccctaggattgaaccaggatgaagacatatccaggaaagccgctgtggccagcctgagcgtaagagagactgcgactccctgcccagtggaaatacactatactgcaagatgccaaaatgagccacttgaatcctttttttcgggaagtcaaaagtacggtgaggcatgagaagaaggatctccagctccaagttgttctccctcttgtggctgaacacactgttaccatatgcttatgaaaccatttgcatatggtacaagcccatgtgggagaaatgagagctctgacaacttctacctgtcttctgtcctctcctgacaatgcatctccatcactaatagtggcctctgggttttactttcttctgtgcacaaagaaaacaactggtggcacctgtacatagagaattccagaggcaggaaactctccttacttttggacagtgcacagcaaagagaatgtagttggaagttcagccaacctggattgcaagccacctggagcaacatggccttacatgagtcacatgactgctgggagcaactctctaaaagagagtggtgaagaaacctaggtcatcagaaggttaaatagaataacgtgtgtgactgggcagagcacacagaaggcaccaaatatgtgttttttagattctttcccaaatctaggaggtggaacttagcaataaaatgccttaaaacctaaaaaaaagttataaaagtgcattcaaggtcatggaaaaatatacattaggtataaaaaggaaggttgtaaatgtatgtaagatgtaacataataactagtttgcacacacccttacaaaataaaagttctataaggatatgcaccaaccgatttactatggctaactcttctaggttctaggcgctccgacaggtttctgttgcatttcccagtgaccatgacccctaatcccctaagcccctaagcctccctcttttctgctcacagagaactgatgagaggagagactcagctcaaaagtgttaagtgaatgaagtcatttcttaaaatattgggtttatagtttcctttttttaaaaataaaacaaacgatatagtttataagctttttgctagaaaaataataaaatcttatttaaaaacatatactgttaacattaatgagatattttcccacttaaaatctcatttgatactcccatcaaataagatttattctttaggatttgagtaattctgggaataaagccttaataaatcaggaaggacaacatagtcattaagtgcctgggcactgcagaccctggtttccaaaccagctactttctgtctgacttctgccaagttactttgcctctctgagccaaagtcttctcatgtatgaaacagaatcattacagttctcccctcaggatgtcatgaggagtcaaggtctaggagcagtacctagcacagcacaagcacgatgtaagtatttgctaagtgaatgaataaaaatatgatgatcttttattatgctgcctgatttggtaatatgtgttagtaaatgtttgtaactaattttatcatctcactcttaggaattttaaaaaatcacttctagaggtgtacaaaaacacttgcatatgatcctgttcatttcagcattctatgcaagaacaaaaaattgcaaacaattaaagtgttcactaaaggaatgttggttaaatagattacagtaaattcacttaatgaagtatgacatagtcctttaaaagcatgaagtaggtagatttataggttgatgatagaagtatctattcacaattattattaaatgaaaaaatatgtaataaaatgttaggtataatatactttatatagcattaacacagtatctgtgaatattttcaaatacagtccacagtggatatttctctcatgctacacagacagatcagggtcaggatcttggctctgccccttattaactgtagaactctgggaaattcattgagccccttggagcctgtttctacatgtataaagtggtgataatatcaattattctgcagagttgttttaggttttcttttcttttctttgttttgttttgccttttttttttagatggagtgtagctctgttgcccaggatggagtgcagtggtgcgatctcagctcactgcaacctctgcctcctgagttgaagccattatcattcctcagcctcccgggtagctgggattacaggcatacgccaccacacccagctaatttttgtatttttggtagagatggagtttcaccatgttggccaggctggtctcgaactcctgggctcaagtgatccacccaccttagcctcccaaaatgctgggattacaggcatgagccactgtgcccgaccctatttcaggtttaaatgccataatctccatgaaaatccctagcaagcagcaggtactcagggtggtgtttgttcccacagtgactgtatgtatctgggggacaacacgggtaatgcatgagattcacaagtccatatgtaacccacacattgtctgtaaaattaataagtgatgtgttactcttttcaaatataagtagagactgctgtaaataacacaaactcctattaagtgacattactgaatccattaggcgtgtaggcagatactttattactacaaatttagctatcttatgagtaattcaatgtttctgatgttttaaaagggccctcatgaggcaatttgaaaatatgtctctaaagccttaatattaggcaggaccctgggcattgaataaagacttgttttgaggtccacagagaggagacacaaggtcacaagatggtcccatggccagcaagtggcagagtccagatccaaaggacgtctgtctgactccagacctcaggatcttaacccccacacaataaaacaaaatgtgtagatgcagctaaagaagagctcagatggaaatttatagcatttgatgcttattttagaaaagaaggaaggctcgagtcaacaatctaaacctcagctttaacaaactaaagaaaaaaaagggcaaaataaacctaaaacaagcagaaggaaggaagttttggtaagttaaagaagccactctcaaaaggttacatattgtatgaacacatgacattatggaaaaggcaaagctacagggacaaaaaacatcggttggtggccagggattggggtgaggcaaggatgccacgacagggagcatgaagcagatttgtgggagtgatcaaactgttcggaaccttgattggggtggggcaacaaaactcatagggcagtatacccccaaatagcctttttattaaaatgataatctctcactgtttggaatcctgattggggtggggttacaaaactcatggagcggtatactcacaaacagtctttttattaaaataataatctctctctcactctctctctctctctctctctctcgatctctcacacatacacacatgcacgcacacaatgtttctcaccatgcaggctgtgtctgttcaccactgccaacggtatgccaggtataataagactaaatatgtttttttgttgaattaaagccattcattcaaaatgaatcactggtacccaaaagatggggtctaacttatgtttaattataatgggaataagtagcacttattgactgctttttaatttgccaagtactgccaaagattgagatgcattattcaaatgcatttataactcttagatcattcggttctttataatggcatatttcgtagccatttctatttcttgaaatttcaagtctttttggtttttttgattcttttggcaaactttcttaaaagtacaagagcccaagttgcacaggtaaataatagcaatgtagcggaatgaccaccagatggagacagagaacacaaagttattcagacgcaaggtttttgccagagttgtttcccaggctcaggaggcacaacacctggatatgaggttgctcccattaggacgctggttctcaaacctggctgctcattaaaatcacctggggacatttacactactgatgaacagcccccttcaccccacccctgagttttgtggtctggagtacggtcttgccactgagagttttaaaagctgcacaagtgattctagttgcagacaagtttgagaaccactactttcaaacatgcaacagtggagggtctcgagctggtgtgtttcagaatcatctggggaattcgtgaaaaacagagactcaggctgttgtagccttcattcttttgagaagcagtgtattctgaaatgatgacatgctaaacttaacaatagttaaaaaaaataatcagtactgaatctgatacaaggccaggtgtggtggctcacacctgtaatcccagcacttcgggaggccaaggtgggaggatcgcttgaagccaggagttcaagaccagcctggtcaacatagcaagatcccatctccacaaaagaaaaattaaaaaattagctgggcatggtggcacatgcctgtagtcccagctactcggaaggttgagatgggaggatggcttgagtccagcaggtcaaggctgcagtgagctgagattatgccactgcaccgagcgtgggtgacagagtgagaccctgtctcaataaacagataaatcagatacagtctcatactagattcttttccaaactgggacagcgggtttcctctccagagaagtataggccacacatgctggcaggtgctggaagagtttctaaagccatgtttggttgttccattttggggtgttaagaaaaaggccactcagcccggtggattcccagccttcatgtagtctactccccaaatttgttttcactctcttttatcaaagtgtttaaattattttatttattttaatttttaatctgatttttttttttttttttttttgtagagatgggggactcgctatgttgcccaggcttgtctcaaactcctggtctcaagccatcctcctgctttagcctcccaaattgctgggatgacaggtgtgaggcactgtgcccagactaaattattgtaatattacagctattatggattcggtttctaaataacatttgttgtttttccatatcataaaagtaatgaatctccattgtggaacatttggaaaaaacaaaacaagacacacatgtaagaaaaaatgacctattctcctgccacatggagataatcacagttattttgatatgtttcattatagattttttcatgatatgtgtacgtatgtatgggtatacactcttaagtgtgtgcttacacgtgctccaaatgtgtgtgtgtgcacatgtgcacaatccaatctacatcgtggggaatctacaaagttgtggtcacagtgtagagccagccccacaggcctccccagagacaaggccctggactgcccccaagtcctcccgaaagggacatctgtggtggtggtagggccaggatgccatgagcaaccacctggaggccccgagtactcagcgtgaaccaggtagtggaagggaaggggaagggcagagtgagaaccaggaggaatgcttgcttttctttccaagcacaagggaccactttctccactgcagctgacctgatgcttatgccgggaaggaggaggggcagactccgtcctccaggtccctcaggaggggagaaagggaccaaagtgggagacttgggtctgaggtctgaacttgaccctgcacccgcatcggtttctctgggtgggggttggggagggagcaggcagccgagggccctcacccactgcagggtcttgtggatcacgagtgatcctgtagtaagtgagggttttgttcacgtggttcagagtgttacggagagcttttgttctaagcttatttgcctggagaaaggaaaaaatgatcttattagcaccaaagggtgtggtagacagaacgatggcccccagagatggccacgtcctaatctccgaagctgtgaatatgttattgacgtggccatggggaactgaggctgcagatggggttaaggttgttaattagctgactaattagggagattatcctagactgtctgggtggcccaatgtggtcacagggttcttaaaagcagaagaaaggacagagaagagaagagtgagatgtcaccaaggaagaaggccagggagatgcaaccaggccggctgtgaaggtggaggaatgggccaccagccaaggagggcgggcggcctctagaagctggaaagagccaggaaatgggtggaatccccaggctccagaagaaacgcagccctgccgacaccttgacattagcccagggagaccactgtcagacttctaacctgcagagcggtgagatagtaagtgtgttgctctaagcctctaagtttgtggtcatttgctgcagcagccataggaggctcatccaaggaggatcccagctccagcccctggtgccctggggtgggttctgcaggacacctggtgtggaactggagtctccttcccagggcatgccctgcctttgcggactgtcccctctgcctggaacccatcctggcctcaggcatgctcgtgcagtggcctctctgagcgggagtattgccaccactccttcctcctgtgccagcgactctgagctccgtgtctgactcagtctgatgcccgccaccccggcctaggtttggaggtcaggcagcccggggtttcaattccagctctgtggcagcgtcaggttccccaccgtgcaaaggacacaggaatccctctctcgcactgctttcaggagctggtctacaaggagactgctctttataaaacaccggggagagtcccggggacttcctacaacaggccctgccggctccagtcccacgagttaggggtcactgagctcccgcattgggcacacttccctggttacactcactcttggctctcacatccctgagctccacctgcagcataaggacacccaggcctggtgcggggagccatttcttccccaggagtaggtggtggggcactgccgtgtctcctacagccctgccttccccagagaaggcgcaatgttcccttctggggtggtcctcctggactgcggtgggccccaggcatacacatttaggtccccaagtcaactcagactctgccctgtgaaactaaaaataaagcaacactgaagtgtaggatgcacagaaggaaggaagtctaagaagttctgatttttcatggctcaaggtcaccttgatgcttttatttaatagcatttttttctctcctctcctagatacactgttgtgctggtgccttaagtgcatttgtggttggcctcttggcccatctctcatgggaatgaggattctgtggtcaaatacattgggcagatgctgcctacttcatcccccttactgagagtcgaggagcagcccatcagcacattaaaggctctggtaagtcctacagtaaagaaactggtttaacaatgttttccagtgtgatctgaccacagtctttgtttgcacatcatagtaacctccagctgagaatgcttcttataaaatgccagcctggaaattctccaggggtttcccccgatcagcaggtaggtaacgctggaaggcatcccgggtgtgggacagactgggcgctctgcatggaggtgagtggctgaggtctcctcagcttgcttgggctctgagggggagtggcagctgtgggcttccctggactggtccaggccccataggtgggcacagctggtgggcaagcctgggtgaaactccctcaccttcctggctcctggccgcaggtgcagcttgacacaggggtctgccagcccattgtggtccatgggcttcaggtcccgggtagagaacagcaaagggtgtgaacgggaaatcgggggatggagctgccagggcctgcaggtgcctgggccagcagatgcccttgtcccctgggtctcctggctgggtgcattcatggcccctgtcacagaagcccctggccccacacctccagacacagggagtgagggtggcatcgcggtgcaatctcccctcccacaaacatcctggcccagggcagctgttagggggcctctgtcaggacagactttctctcctcgccatcctgaaagccaggtggctcaccttcctctgagcctccctccccaccctgctttggtcaggcccttccctcgtcctgactcctctcccccatcttcccagcaccgcctcctgagaggccacgtccctcactgaccctaaatccacataaccccgggtcaccgtcggagaggccccatttctggccatatttgtcacaactcccagtcagtccacagaggtcacacaagctgatcggccacagagggttcctccacaagacggcgcccctcactcactctgccttccgttcccttagaaaacccagccaagcgtgcagacccagggacacacagaaggatgggcagataggggcttcgctgacctcagcaggctcttgtttcggaaaaccgcattttttttttcttctgggctggagcacagggctgtagggaggcagctgtggcatctgtggggcgcagccggtaaccccagaacattattcaaagatgcaccgcaaggcctctacccagccgggtcagggaggcagcctggctgctcacaccaggctcatctccaaggggaggctgagtctccctcccaggccgaccccaccttggtttggcagagctccgggggatcggggggctcccaaccacctacttctctgccactggaagagggcagaagtttgggggcctggctggcatggtttctgggctcagcccctgtattcactcgctaggaagtggatgagtacttttcacccgaagcctcagctttatcatcatctgcgcctcagccgggcgcagtggctcacacctgtaatcccagcccatgagcccaggagttcaagaccagcctgggcaacatagtgagacactgtctctacaaaaactttaaaaattagctgggtgtggtggcacatgcctgtggtcccagctattagggaggctaagggaggaggactgcttgaacccaggaggcagaggctgcagtgagccatgatcatgccactgcactccagtctgggcaacagactgaaaccgtttctcaaaattaaaaaaacaaaacaaaacaaaacaaaaaaaacgggcaaggatgtaagagtcccatcttcccagggctggagtgagagggagggagacgacgtggacacagggcctggcaggcagagcgtttcctccccttccctgcacgccaggcccctgtgagatgccagagaagtggctgaggtcaggtgggcatacgtgagctgtgccctgcactgtggggctgcctctgggacagggcctggctcagtagccccatgtgcacccacagtgacatggctgctcttccaaacccaactccctcaccctggcctcttgcctttcccaccacgtgcctggagtgcagagttctgggaatctggtggcccaccctgtgcggggggtccctgaccactgtgtcttattcttacaattcgtatacatttgtttgttgtagctcaaaatgttttcactgggtcctgtctcttgacacatttcacttgcatatctttgggccaccagaagttttggcatgtctgtccagtggctctggttgtcccacctctgtaccccaagacacccgtgggggctaggctgggggtgctgccacactgggacggagtgatgcctgctctgtccttctgacccctggactgtgatgggccctctgctgccgcctctcctctccttcacccggcaggcccctgagcaccctgaacagccacacatttggccagaagcaaaaagaccagtgggcactgcctgaggccgtgtcaccgtgctgccaacagcttctgtgcccaaacaggtggcttccctggccctgaccccgggttcccaccagtgcctccacccagccctctgtggggctgccctcccatggagtctgacctctgtccacagaagggggagggcaggaggctgattccaggtcagggagctgttaggggggctcttggatagaccctccccagctagtgagttggcaagagacagaaactgaccccatggtttaggggcggctcccacgggagggacaggaggagtaagccatgagaggaggccctggctggtgctggcactgaggggatagatgggggggcatctggctttgagaggagagcctctcccccaaaccccagccctgcccctccctgggcctctcagatgctgttgctggtgaagtgttcaggagaggagattctgattctcaagtatcattcagcctgaaaaaggaagttttgacacgggctgcagtatggatgaagcctgaagacattctgccgactgaagggaggtagacacaaaagcacagatactgggtgattgcacttatatgaggttcctagaacagtcacatccatggagaaggaagcagaaaggcggttgccaggggccgggggaggacgaatggggagctgctgtttaatgggtccagtttcaattttgcaggatgaagaggcttctggagatgggttgcacacagtgtgaaggtagaaggtactgagcatgactgaactgtaccctaaaaatgggtgggtgggtgggtgggtggggagtgaaggagcaaaaagaaatggttgcaatgggaaatttatacttgtatattttagcacaataaaaaaacccaagagtctccgaggactggcagtgctcattgaatgctcacaacagccacgtagagcagggacaatcaaccctatttacagatgggcaaaccgagacggacccttagaagagcggacaggcaagggtgcaccccggggcgtccagcctcccccaggccctccagaggcctgtgccagtcctgcttctgcttgcccaccctgggcccctccccacaccccagccccagctccccacaccccaggaccccggctcttccgggaaatgcaccacatccccgtccctgcaaagctggattcacacagagaaagaactggggactgggggagccaccatggctcggggcctcccatccgcacttccaatgcctgagggatacacccctaagtggacccccaagcagatcccccatcctggagagatgcgggggttttcgctccggggggggccactggtcgtccccaccttcagcttccggtggcacatttgatcctagggaaactccaggctggcagcctgcaggccctggtgaatgcctgggcccagcgcagacacccctgctgcgcggtggaggggccctggggaaatccgagcgggactctcaccaggcaaggtccacatcctgggcagggtggggtttgacgctggttttctgagtgacatggctgaggccacagctgggctggggctggtggggttggggaggggtctcccatcccacccccaccccacacaaaccgattcctcgctggattgcgacctcttctggcctcggtttcccagccagtcccggccccggccggacatgcaccctcgggggcgggaaaaggtcccggagcgtccgccggtcgggcctcggccccgggactctggcccttgcctgctccatggggctcggggctcggtccgggaggaggggggtcctttctgcccggggcagcgggcgcaaccggtgggcaaaggtccgcggccctggagaacgccgcggcggggtccacggacaccagaggaggaaccgccaaggtttttccaaaggacaagcggcgcggcggtcctcctagctcctcggcccgcgcgccacccgggaggccgaaccggccccagccctgggccccctccccagcccgccccagccccgaccctccgctgcggggccctcccggagcggccggccagcggggagcaactacgctgccggctgcaacgcgtgtctccccgggacgcagctccgcccttcccgggaacaaaagcggctgcccgcgcctgagctcccaaacggctggcgggcagggagcgggcgccgcgcgccggctccccggagcccagccccgcaaatgggacacccacagcgggtgcccccaaacttcccacctctcccgtccggtcgggggaggggtcggggccggtgggcagggcgcggagagcgcacgaagcgcttagggggtctgcggccccgcggcggggggttatgccaagggagaacgcgacgacgcgagggggagggacggagggcaccccgaagccggggaccgccaagccggagccagtggagtggggcgaagtcggcgagttggaaacttcctgcaatcgtccactcctagcctttggcgttcggctggtcctctggcggcttggcgggcggctgcgcagggctgggacctgtgctggatcgttaggcttccgaagagatggtcgccatccttgtcgtggtcgcgggcgccgtcagaggggcggcggcggccggcgctggcagtggctgggcgcgcgggggcgtcatggggcaggtcccgcgggaagtgggggaagtagccagagatctgctggatggggcggatggggccggggcacacgtcgatggccacatgctcctggatgcaaacggtcgccttttccccgcgccgccgggggtcatacaggcagcgcctcgccgcccccgcacggcctggcccggagcgacccccgccgggggcggctcagcaggcccggcatggcgcggcggggcctccgcgaaggccagcgcgagtgagtgccaggggcgggcgggcagggggccggcccagcccgtgtcacccggcagcaaccacgcagcgtgagtgtgcgggctgcccaggcagcgcggagcggagagagctgcgtggggccacactcactcgcactcacaccggcggacacgccggcctgggaccccgtgcgcgcactccctcgggacaagcggggagccagcaggacagggacccacggatcgcacactcactcacacgttcctgcaggtgccagcacatgcggggctccgttcgctctcacgggacacacgaaggtgtgcaaggacaatgcaagtgcacgcacacgtgtgcagacacgtagtggaagcatccactcgctcatacctgtaagacacacacacacacaaacatatgcacacatacagagttggttgaggatgctgtaacacagtacaccccctaatgcacacacacacagacacacgcacacacaggtgatcaagggcacccaggggagaatcttccatacccccaaggacccctaacaagatgcacaaacatgcacccatagaagtaatcaggggaccctgggcacaactccctctctccttccccatctaccaggacgtggagtcacactcctaggcatgtgtggacaggctgcctacacacgggcaggacatgtatatgctcaactgtacaaggacactgcgggcacactctgcgcacacatattctcaggtcacataaacacagcactctgtaacctggagtcagtccctcacttggtcagtgagtgggctgaagcacccactgggacagggtggctgagaaccaggacagggcctggtcaggaggggttgagggcagggcctgggaagtgagtgatgcaatgaggttgggcagtaccaccccccacccaaccacccactgcaggcctcccacatcatcgggtcactaaacaaatcccagagggcccagccccagctgttgcctggctttccagaaacagaactcggttgggaatcgctgctgcttggacaggtctgtccccagaaagccctgggcatggatggagtcctgtctaccctctggtttccactgacacatttacctaccaacattctgtccaagtctcctcttctgagccctcaccagaatcacccttaatggagagtcacagggagaagacgtccacccgcgcatgagaagacaggcctggaacagagccttcctgcacagcctcagaagggacccaccttgctgacaccttgatcttggactcatggcctccagtactgtgagacagtaacgttctgttgttgaaggtgcccagtctgtggtactgtaaaacagccctaggaaactaacacagcctgttagcccacagatggtggagagatggaatgctccatggagctccaggcttactgtctgcagcccccaaagtgtgctccgggacccttgggtgggtgtaggtatgcaaggtaatttggggtggttcaaggtgaagaatttcaattgacataataatgtatttatcttgctgggtaaatgagggatccccagctgttaggaaccaggctacacagcaggaggtgagcagccagccagtgagcaaagcttcatctgtagaaacagccacttcccatcccttgcattaccacgtgagctgtgcctcctctcagatgagcggtgccattatctcataggagcgtgaaccctactgtgaactgcgcatgccagggatctagattgcgtgctccttatgagaacctaatgcctgatgatctgtgactgtctcccatcacccccagatggaaccatgcagttgcaggaaaactagctcagggctcccactgattccacattatggtgagttgtgtaattatttcattatatattacagtgaaataatagaaatgaagcacacaataaatgtaatgggcttgaatcatctccacatcatcccttccccttctcccgggtccgtggaagaattgtcttcaagaaaactggtctcaggtagcaaaaaggttgggaaccgctggtgtaaatgcttcaaggaatagttaagcagcttaaggtttacatgctacaaaaagtacaggttcaaacgctaataaaaatgggtgcaaatgaaaacactctcttgctgtggtccaaggagttttaagcattctatcagaaagacttgcagcttggagctgcagctgccctcccacatcctgtccactgtaacccctgcaacacacaaacacacatatgcacacacgcgtgcacacacacacacacacacacacacacacgctgtgcttcatgccctcacttgggtggcctgggagggaatgtgtttgtttgtttgtttgtgtgtttgtttgtttgttttttgagatggagtttcactcttgttgcccaggctggagtacaatggcgaaatctcggctctctgcagcttccgccttctgggttcaagcaattctcctgccttcgcctcccaagtagctgggattacaggcatgtgccaccatgcctgggtaattttgtatttttaatagagatggggtttctccatgttggtcgggctggtctcgaactcccgatctcaggtgatccgcctgcctcagccttctaaagtggcgggattacacgcatgagtcaccgcgcccagccgggaatgcatgcttttaggagaaacgaagacaactcaggcccctcattctcctggtgtttgcacaagtgccttctccacagaccatgcttcagtctctttcttagttctccttcttactgaaagagagaagcagagtcccatcatgtacccagctgcttggggcccaagccaagtgtgcaagcttcctggggagcctagtgagtggaaggcactgcagactctccccaaagaagcatcagtttttgatggatccttgagcccaggaaggcaatagacaagacatcatggttcaccagaagagacaacaaaaatgcggtgaggaagggcagtagtcaaaggttttatgctccatgagaaggggttctcagggctctaagcagcaggcagactttattgcatgtgtggttaggtgatggcgacctacagttttcactgggaactgggatcaagagtaactcgacctcctactcctgcacgtctctctctgtctctttgtgttttgtatctctctccccatctcaccctccttatcctctcagcctcctctgtctctctccaaatctctcttcctctctcactttcccttctcctcatctctctttctctctccttcttttccagttctctctccctcctcatctcgctgcatgccactgttcacgctcctggggctccacgtggacaggtggacatgggactcctaggctaattttcacggcacaagcacagggctgcaggaccttggtcccccacctcccagcaccctcaaaatgagaggtgtggggtctgcccgtgctctcctgggtgggcgtcccacgctccaggaagcagaaactgcaggacaaagctggcgcaagtgacatgcccgcgtggctgccggcttccatcttgggatctgctgaggccaaagcagaagacacctgccccggaccgaccctgcaccagggtaggggtaggggtgggtttgggggtgggaagggcgatgggagcagacactgcaaagcagtccctggctggcttcctgccccgcaccctgccatgcgaggcctctcctcccgcccccagccctgcccctcaccacctccacccctaggctgtccagatccaggctccagaagtctcctaggatccaagaactaagggcaaccactgggctccgcagcccctagtccatgagtcagccacccctctgcatgctgacaaaccttggctgtcacttatcctccaccccaaaccagccccagccccatcctattgcaggcctgtgtggctgctggagaggctgggctcccttcctcaccctgaggctgcctgatatgctttctggatcctggagaaaactgacccactattctcatactggtgcaacttcttccaagacctcaaaactggaccacatgaacttgtcttccttcttgtttctccttgctagggctgtcattgggacagtccgagatggggggtcgggggagacaatggatgaatggatggatgaatggacgtccccccaccagcattaccacctcctcctaaacatagtcctgagagctctatttcctggtaaacttcccccttcccaccctggtccagagaagcccaaaggccagtgccctccacccacgcttcctggggtacactctactctcttcttgcccagatgtcttaacctggctctaccaagctagaacagatagcagggatgagcccccagcctctaccaggaagatttgccaaaatgttctcagtttagaagcaggggcagtgacggggcctagggatgaccccagggttgtcactcaagcaacaagaagggcaaggagccctgtttcctgcccttatcctgggagaacttggccagggctccacaatgccctgcaggggcaggaggagaacaaatacacccttctctggaggaagtcaccaccatccccaggaagcaggagatgggagcacactggcagagccctcgcgtgctatagggcaaggccggcaggtctgtactcagcctcagccccaggggagctgcaacatagactgagaccctcacatgtttggctctgtgtccccacccaaaactcatctgggattgtaatcctcctgtgtcaagggaggaatctggtgggaggagattggatttggggacagtttcccccgtgctgctccccggatagtgaggtagttctcaggagagctgatagtttcaaagtgtggcacttactggttctccactcactccctcctgccgtcttgtgaagaaggtgcctgcttccccttccccttctgccatgattgtaagtttccggaactgcaagtcaattaagcctgtttcctttataaattacccaatctcaggtatttctttacatcagtgtgaaaacaaatgaatacagtccccttccctgaggtgccttccccttaggcaaccagctgcccccatgctcctcttctgccccctggtatttcctttcccctcatgaggcccaagtgatccacatggccagccccagccccatcctactgcaggcctgtgtggctgctggagaggccaggctcctttccgcaccccgaggctgcccgatatgctttctggatcctgtagaaaactgacccactattctcataccggtgcaacttcttccaatacctcaaaactggacaacgtgaacttatcttgttgcttgtctcttcttgctagggctgtcattgggacagtccgagatgggggggtggggggagacaatggatgaatggatggatgaatggacagtagtccagggagatgtccctgtgtgtcctgaactgggcccttcctccaatgagaagccttcctgagtgagtttctacagtcatcccttggtatccatggattagttctagggtccccggggatgacaaaatccatggatcctcaagtctctgacataacatggcctagtatttacatatcagctatgcacatcctcctgtagacattagaccatctctagattattcaggatgtgtaatacaatgcagatgctacataaatggtcgtgatactgtattctttagggaataatgacaagaacaaagtctgcacatgttcaatagaaatataactgtccaatttattttctgaatattttccatctgctgttgctgaatctacagatgcagagctcctggatatgagagccaagtgtgctttgagagtagggtgggtgaggttgctaatgagtacaggggagcaggtgttgatcaggaggaccctgcactggggcatctggacgtcctgcctcaggacttgagactccagttggatggcacaggcagactcggcacaggcagactcagcccaggtcaaagccctccccttggatgttcattttatcccaagctctttctggaccctggaatttggcatcccctaggccctgcgtggaaggacagatgaaccaggttttagataacacgtctagaagagtgagcccctactgtgtgcccggcactttccccacaggatcctctagctagaatatccaagggtcatggagagaaatacccagttaaaatatcagaaacgaaaaagagatacaattagagacactaaaaagaccattagggacactaaaaagaccattaggtaatagtattagtatttgtattctgagatccagcagcagcagcagtcacttccctccacccctatgtgtatcccaggaccaccctgggcggggagggctgaggttagggagcagccagggatgctctgatgctggccctgggcctcgggggtgacagtgatgaggaactgggtgcacatgagtggggcagccaggcctggccagagaagcaacatacacgtgcacagacgtgtttatccacgtacacgtgtgcacgcacgtgcacacattgcaggcaggcacgttgtggcactttctagctgtaccctatgcttgggagaactactgtttcgtgttacctccacagctggctttatttctgttacctcagcgggatcaatggcagggcagatgtttactttgaactaggagctgagttatactttgtcagattcaatgaggtgacgctgtataaagggtctggttcaggggcaggctgtgagtaagggctcaataaattacaactctaatgactagctataaattatcagccacattattaggacagcaatggcccagacttgataggagcccaagggacagcacctaacccagccagtggaagggagattggggaaggcttcctggaggagataaggactgggctgagtcttagaaggtgagcagacaccaactaaagaaggtgagaagggcaatccaagcagaggaaaccaaatgagagggagcacagggctggggtgcgccagagcatcttgtgaagggcaggagtcttgagagatgagactggggaggtctgtggagccaggggggtgagcttgcttgctggggttactggtttttctacaatgagtaacacaatcctgattttataggggaggagacagcctcagtgatggtcacttgattttagaagatggagctcagctacctctgagtcataggatagaatgctaaggcacaggctgggcacggtggctcatgtctgtaatcccagcactttgggaggctgaggtggacagatcgcttgagcccaggagttcaagaccagcttggacaagatggtgaaaccccatctctacaaaaaatacaaaagttagccgtgtgtagtggcacacgcctatagctccagctactcaggaggctgaggtgggaggatggcttgagtccaggaggtcgaggctgcagtgaggcgaggacatgctactgcactccagcctgggcaacagagagagcaggaagcaaggaagaaaggaaagaaggaaggaaggaaaggaaggaaagaaggaaggaaggaaggaaggaaggaaggaaggaaggaaggaaggaaggaagggagcccagacagggaagggactcacctaagtagccctgcatggagggagctttggttttcccaccccatttccagtgctccttccatgccctccccctgccttcctctcactggaaacagcctctacctgaccttgtcctctgcatcctctgataggtagctgataccagacaaggttttgcagggactccaggtgcccctcggtgtctgttgagattaaacccaatgcaaaataaggcttaatcccaaatctgcaatggagaagaaagacaggaagtttccttcttgcctgggccagaaaaggctgcaggtcctgtcccttcccttcaccccaccgtccaagtcctccctgggctgttcagggattcctagggggtcaacagagaggggtgagagctggaggcggtcactggggtatgacggggcctccttgacagagcaggtggtgaactttctgcctttaaatattttgaaatagcaacagacagaagaaagcacaaaaaatcccagatggcacattatttcctccagcccggtgtccccccacctcccagggtcccaggcacaggagcccaggttcacaccagcaggaggctaggactggaaattctgcagactttccaagcgtgtttattcacattcctgtgggcccccaggaccctgctgagcttcccaatattagctgagaaagaaaaaaagcacttcctgacatccggagcagatttgacattcatggttagacctcaatgttgtcacaaactcatctgactttcatggggaacattaacaaactcacagaattccaacctccaataaggttactctgagaccatgataaaatgaggcaaggcaaggccatgtcataattttgtctaagcactgacaaaaacaaggtcactatgctgtcacccataaaataccaaataatctctctcggctaaagtgagtgactgctatcctttgaacagatttataaagatctaattcacataccatttaactcatccattcaaagtgtataatttggtggctcatgcctgtaatctcagcactttgggaggccaaggtggagaatcgcttgagcccaggagttcgagaccaacctgggcaacatagcgagaccctgtctctacaaaataataaattttaaaaattagctgagcattgggagttcaagaccagcctggacaacacggtgaaaccctgtctctactaaaatacaaaaaattagccaggtgtggcggcatgcccctctagtcccagcaactcaggaggctgaggcaggagaattgcttgaacctaggaggcagaggttgtagtgagccaagatcgtgccactgtactccagcctcagctacagagtgagataccatctccaaaaaaaaaaggctgaacatgatggtgcacaactggtagtcccagctatttgaggtgggaggtcgaggctgcagtgagctatgattataccactgcactccagcctgggcaacagaacaagactctgcctcacagaaaaaaaaaaaaaaaaaaaaaaaaagaaaagaaaaaatgtacctatcagatactatgctttttactggagtgatgaaataatctgtacactaaacccccataacacacaatttatctatataacaaacacacacatgtacccctgaacctaaaagctaaaaacattgaaaaaattatattcactgaagcgtgcaaccatcacgttatatttatttattttaatttttaatgtttgtgagtacatagtaggtgtatttatttatggggtatatgagatgttttgatacaggcttacaatgcataataatcacatcagggtcaacagggtatctatcacctcatgcatttatcctttgtgtttcaaatgatccaattatattcttttagttaattttaaatgaagttaaattattttttactacagtcactctgttgtactagcaaatactaggtcttatttgttctaatttttttgtacccactaaccatcccctcttcccacccccgccccactgctacctttcccagcctttgataatcatccttctactctttatgcccatgagttgaattgttttaatttttagctctcacaggtaagtgagaacatgcgatgtttgtctttctggcttatttcacttaacataatgacctccatttccatctatgttgtttcaaatgacaggatctcattcttttttatggctaaatagtactccattgtgtgtatgtaccacattttctctacccattcgtttgttgatggacacttaggttgcttctaaatctgggctattgtgaatagtgctgcaataaacacaggagtgcagatatctcttagatatactgatttcctttcttttgggtacatacctagcagtgggattgcttgatcgtatggtaactctatttttagtctttgaggaacttccaaactgttctccatagtgattgtattaatttacattccatcaatggtatatgagggttcccttttctccacaacctcaccaacatgtgttactgcctgtcttttggacagaaaacattttaactggggtgagatgacatctcattatagttttgatttgcatttatctgatgattaatgatgttgagcacctttttatatgtttgtttgccattttttttttttttaagacaaggtctcactctgtcgcccaggctggaatgcagtggtgcaatctcagctcactgcaacctctgcctcccgggttcaagcaattctcctacctcagcctccagagtagctggggttacaggagcccaccactacaactggctaatttatatatatatttttagtagagacaggggttcaccatgttggccaggatggtctcaaacccctgacctcaggtgatccacttgccttggcctcccaaagtgctaggattctaggagtgagtcactgcgcctggccctgtttgccatttgtatgtcttatttcttttttttttgagacaaagtttcgctcttgttgcccaggctggagtgcaatggcacaatcttggctcactgcaacctccacctcccaggttcaagcgattctcctgcctcggcctccctagtagctgggattacaggcatgtgccaccacacccagctaattttgtatttttaatagagacggggtttctccatgttggtcaggctggtctcgaactcccgacctcaggtgatctgccctcctcagtctcccaaagtgctgggattacaggcatgagccaccgcgcccggccttatttttttttttcaatgtagaatatgtgtcttcttttgagaaatgtctattcagatattttgcccatttttaaatcggattattcgatttttttcctatggagttatctgagcttcagatgagtggtttgcaaatattttctctcattctgtgggtctcttcattgattgtttccttcgctgttcagaagcttctgaacttgatgtggtccagcatgctaaattcagaacatttccatccccaacatttcaccccaagaagaaaccccacccccctgagtcattacttccaaatcctcctctctccccccaacccttgacactcagcctcccaagtaagtaggactacaggtacatgccaccacgcctaattttcttttcttttttgtttttgaggagatgaggtcttgctatgttgctccagctggtccttcacttatttaatcctaccagctagtgttctggtatctcctctgaatttttaattaatttcacttccagagaattaagtattatttttgttgacagtttgttctctcaaacagcattgcatttagtaatacttttttagttgttggggtttttgttttttcaaatgttactaatttgtttccctttccagctgaagaaatagtgaccaggggagtaaatattctcaggccactgtgtttgtatattatggacaatcaagaaagaactagggtatgttagagacagaactccagaggtcaggtcatctccgtctactcacttggtggacttggctaagtcacgtgatctctctgggcctccatttcttcatctataaaatggactaatactttcaacctagtacatgaaagaaaatatgctgattgaaccaatcctactcctgttgcaacctcacaccagagcacaggctgggtgttcatgtatgttcccttgcctggtctctggctttccctctaggagatatccttcttaactctggtgctcctgggagctgggctaaagctgatctctcgattcttgcctctgcccagtttcattgcaggcagcctccactgaactatgcccacatcatcatccctgaatggaagatctatagcatgatgaggttcaatcaaatcctgctaaacaaacaaacaaaaagccactggcctgatcggttgtaatatattctttacaaagtcctttatgatacttatcttagtaaaaaatggtgttaaaactttgccatatatgccaggcatggtggctcacgcctgtaatcccagcactttgagaggccgaggcaggtggatcacctgaggtcgggagttcgagtccagcctgaccaacatggagaaactctgtctctactaaaaatacaaaattagccgggcgtggtggcgcatgccagtaatcccagctactcaggaggctgaggcagaagaactgcttgaacgtgggaggcagaggttgcagtgagcccagattgcaccattgcactcctgcctgggcaacaagagcgaaactccatctcaaaaacaaaaacaaaacaaaaaaaaacccccaactttgccatattgcttatgtggtatatcttaatctataacaaagtgacacccgtgtcagccagcctacacccctggaaatcagccttccttgcttagggctccagcaaggctctccccaccctagctggtctcctgggaaaaagaggaattcaggcagcaacagtcaagcaagcaggtgcttcagcaagcaagtaatccatctcaagaagccgtaaccagcgatcgttcaacaattcttaggagtcttgtgaagtctgcaagctccataaacgagggctcttgcatgtcctcaggtgagctctgctttgttgtcatcttattgaagtggacccacagcagcaaggtgagcaaagccaaaggaagccccctgcctgagtctagctcaggtgaactgacagtccagacaggacaaccgagagggaccctgttttcatactgctataaagagctgcccatggccaggcgtggtggtgggcgcctgaggcaggaaaatcacttcaacccaggaggtgcgggttgcagtaagccagatcacaccactgcactccagcctgggtgacagagtgagactctgtctcaaaaacaaaacaaaacaaaaaggccgggcacggtggctcacatgtgtaatcccagcacttttggtggccgaggtgggcagatcacttgaggtcaggagttggagaccagcctggccaacatggtgaaactccgtctctactaaaaatacaaaaattagctgggcgtggtggtgtgtgcctgtaatcccagctacttaggagactgtgtcaggacaatcgcttgaacctgggaggtgggggttgcagtgagccgagatcacgccactgcactccagcctaggtgacagagtgagactccatctcaaaacaaaacaaaaccaaaaaactacccaagactgggtaagttagaaaggaaagaggtttaattaactcacaattctgcatgactagggaggtctcaggaaacttacaatcacggcagaagtggaagcaaggcacctctttcacaaagcagcagaaagaagtgtggagtgatgggggaagagccccttataaaaccatctgatttcctgagaactcacacactatcatgagaacggcatggtggaaaccacccctacgattcaattacctccaccaggtctctcctttgacacgtggggattatggggattacaatttaagatgagacttgggtggggacacaaagcacctaaccatatcagccctaaagccatggctggagaaggctcctgccagaagtccaccccgaagccctcagactccactgtggcctttcctcactctgcttcctatctccatttttctttccctgaaggaggttgctctatcaatgcctcccgtgacaacacatgccccctcctcccccaccccccaggctcagcgataaggaagctggtgccctgaatccctgccccacccaagactctttccttttcttcccacttagtctacttgaaactcctctctgtatttttttaattaagttacccacctcagctttgtttctcaaaggctttaacttttccgggaagagctgcaatcgtttcttggcaggagtagtttcaggtttgcattgctctgaaagagactctcagaaacacgggacctccattttggtgtcagcaccgcacgcacccccacccaagccagcaccgtggctggaaagcttacgtataggataagggatgtgggtggagtgggaattgacgtggaggatgttggagatcagatcaacagatgctacaaaaaaacccaacccctccccaccgaaagacggcaatactcaggctaggagccgctgcactaggtgctagggacccactgaattttcaccagagcagtggcttggtcagatctctatttccagaaacatcgccctggaatcctttccttggcgtggaaggagaagttgaccccgaagagttactcagtcaagggcgactcattgctccactctaaggtttctctaagcacagggcggtggcgaaagggaagggctgcagggtggagtccggcaccaagacctcccggcccggcttctagcagcacacggacgcttgagatgatttcttctgaaaacgggcagtggttgaaaaccactgcttcaaaacacagactggaggagtggtaaatactaacgaggagttttagcaatggactctgttaacagagtctggtcgcctgagaagggcctcggaggactggccaggttggagaacgatttcaactgcgtactggacgacacacagaagactgcggggagccttagcccctacccggcctgcagtgctctctggggcacacggcagccccacgacgcctttgggtttcttcgagcgctactcgcacgcaccagcgcccacacagctgcaacgccaaacgcccgccagcaccttagggccgcgggagtcccttccccaggcccgccccacacgccggccttttctgccgcttcccaagccggagccaatcagcgctcagcagcgaccggcagggacgaccaatcgacttatcctgcgttgtgctaaagacctagaaatcgagcgtggtacattcgatcgacggaacgtctgggccctagtgctaagttgggtgactgttcggtggttgtctcggggggttgcaggaagatcctgtttccttggcgtagaaggagaggttgaccccgaagagttaagattctcgaagcacactatttatccgtggccctcctcctccttcgcggggtagcttggggcaagtcatctattctctctagatctgtgttctgcctaaaaattaatgaatgggacaaaatggtctctacagtcccttgtttatcctggccctgcaaatccaggatcgctgccgttgtatctcagtctgatgtcggtggtcttgcgctggccggtgttctgaaactttgtcggcagtaacatgcactccagtcagtctcttcagtccaggacaccatcgccggggaaactgaggcataagaaaaataaaaatgagcattgtccatccacaaatatgtattgtgctcccgttgtgtatctggcactgccctggtgctgggtcccctatgagaaacaggcatggtccttgtgcccctagttataaactatgtcacttccatcagactctgagatccccagggaggagctgtactctcatcaagctgctctcatcagcagacaggaaggagacagacttgtaggcctgcatgctcctgtgctcctcttgaactcccagctcagccactggctgccttttacccacagatctgaaaggagccagggcggacaggctccagcagtacctcttttcttgaggaagccaccttctcctggctgtccaaccctgaaaggaccttggaagtttgggggagtccctcttggcactctgatttatccagaatgcacctaatcaccctctacacatgcacacccgccccccccccccccccgacacacactcctccagcctgataccctgctggggttcttttgcagagttttgtcttgaggtcatcagagaggtcgtgctccatggggcattgaagcaccacagagaaaaacccctgcaaggccaggaaagcatctgagaggcatctgaagtcagaaggcctgtgccggaatcctagctgtttctggcagtgtggtctgggtaatttaacttctaccagcaccatgtgtataaatgaacatcatcacagcacatacctcacagattgctgaaaggattaaatgaaatgatggatataactcacttgcagcatgcctggcagagacatatagtaaatgggcaagaattgggagctactgttattattgtgttattgtgattatattcagcaggaaggaggcctcccaggctaggcgccagtccttgatgagaaggtgcccactttatgtcctctcctgtttctaactctcctcttctgccttctgtggtcccagctgagtggctgtacctcagcaatatccagtttcctgcctcagaacatgaagcccagatatacaagctgaaggagggtgccacatttgagaggcaagggaagatcaggcggggaccctgtgcttcagagctttggtcacatccgcaaggagcacagcaggccctaccagataaacagacaaaatcaggagggctccaaggtgggacagagaaggaagattgttaaaaattgaatctgctagactgggcgtggtggctcacacctgtaatcccagcactttgggaggccgaggcaggcggatcacgtgaagccaggagttcgagacgagcctggccaacatggcaaaaccccatctgtactaaaaatacaaaaaattagccaggcgtgtggtgcgagcctgtagtcccagctactcgggaggctgaagcacagaattgcttgaacccgggaggtggaggttgcagtgagctgagatcataccactgcagtctatcctgggcaacagagcaagactctgtatattttaaaaaaaaaggcaaaaattgaatctgctgtgcccaaccaagccatcagctgatcagctgtggggtcctgccctgaatcatttactcctcaccctatctctgggaccatcagggcaggcaggcagcagcagatgttttccaagctctactgctcccaggccagcatgacatctgcagtgaccattttaacaggctggacaccctcgtgtccccctaccacttatccttggcccacttgccacttgtgccttacccagtggggagggagtggcaaggccttggctctgggttccacaggtagagttttgcagaggagtccagtgaactcattctttacaaaacctacccaggcctgctttcagccacccctcctgctaagattatatgtaatatataatattatatataattttttatagagacagggtcttcctctgtcacccaggctggagtacagtggcatgaacacagctcactacagctgcaaacccctgggctcaaatgatcctcctatctcagcttcttgagtagctaggactacaggcatgcaccaccaggcctagcttttttttttttttttttttttctgtagagataaggtctcactgtcttgctcaggctggtctggaactcctggccaagccatcctcctgccttgtcctcccaaaaatgctggtattacagacatgagccaccgtgcctggccaagagactatatattttgagcagctgctggaaagcggggactaagttctggtctgaggagaacttcctgggcgtccaggaaagaaatatctgacattgttggtgcacagtgagtatagtcctcactggtcacccagaggacagggtgtggctccctccacagtgtagctccctagcccccaaaagctggacctgggctctccccagtcaccagagatccctctccttcgtccccaacaaagtgtttggctggctgcagcaactgtgcagaccctgactagtggacattcctaagtaccaggggctcgccttgtgtcccgccaggctggtccagaaggctgttgcgggcaggtgggataagaaattcaggaagctgaaacagccagaaggtggaacctggccggctcgggggaactgcctgtggaatggcccagcgctgaatgagtggaacagtgggtgggccttgaaagcgaactcaggagatggggcgttgtgtataggcaagtcgctaaccgggagccccgcgcctcattccgactggatcagggggccccgcctgtccacggtccccatgcgcggtgcgctccccctcctagggccgtaattgccgcagccatccctacgcgtctccagcccccgtcgtctttgtccattcggttccgaggccgcgcttggactggggcgcccacgactgaccccggaggcacagcgaacggggcagctgcagggactccctgtcctgcaggcgactgggctcccgcgaggcagcaggtgccgaggactagcagcagatctggtgtgcagaaccctggattcgagtcccggcttcagagaccctcggctgtgtgacgtggaggcgtcggccgccctctgagagccttcgtggatgacagctgatgcttgggcctaccttcctcggctgctgagaggctcagaagggaccgcgtgtaaaacgccttggaatcttaaatctacttaattccatttacctgcttcccagaaacggtccatggcttccgtcccggtcatagcgctgcgcagcgggaccgttctgccccgctgccctcgaacagcccgtccgcgctccattgcccctccaggtgccgttattttgccttttaacctggggcgggaggttttagacgaggctgcaagtctgggccagcggggacctgagggtcccttgcaaccagcacccgcgacggtgtctacactggaattccaaggaaaagagggctccaggggcgcgaccaaggtttggtcttctgctgagcgctgctggatgaatcgccagccttcgcccgcggccccctcctcctcatccctgaccccaactcgacaagatcccccgagcgcaggcccaaactccgcacagcttgtgggccgtgaggtccgggtctcgaagctcggtcccgctggggctgtccctccgcctctacttccagggtaaagaccgcggaaccaggcgggggtctggggagcctggctgcgacctcggctgcaggcttccgcagctgcttccagggtgctgtccaccccgtggtgctgaagtgccccacgcccctccgccacctaccggaagccgcgtccgcgctacagcctccactcaggattcgacccgaactccaagacgcgtccgcactggtccaacaaccctcatggatcgtcgcctgcctcaactgtttagaccaccgcgggtttcacccggaagcaccggggaggtcggagcttgcctgagaggctcagcgaaggtccatgccttgttcagtcccaggcagtgcgggacaggtgggcgaagctcgaaccccatgctctgtcccggcactggcaggaattcacttattatggagatagtcctcgctcactccagacctgtcctgtaattgtctgggccccgggaaggtttccctcggtttttagaatctcaaccgcggtgtggccatccaagctgtgccaacgctactacctgcgaagcaggagagaaaaacccctggaattcctcccgcacatctttcacaaagtgaatatgcccttctttgacactgggtacagccacttcgggaccagatttttgctcctgagcatataaaatcacaagcttgggcaggcacagtggctcatgcctgtaatcccagcgctttggaaggccggggcgggcggatcgctcgagccgaggagctcgagaccagcctgggcaacatagtgaagccccgtctccacaaaaaacataaaaatgagtcgggagtgatggcactgcacctgtagtcccagctacttgggaggctgaggtgggaggatcacctgagcccagaaagtttcagtgagctatgatcacaccactgcactccagtctgggcaacagagcaagaccatgtcaaaaaaaaagaaaagaaagaaaaacaaaaagaaaagaaatgtctttcctttttggaaagcttggatgaccacaagggggttgagattctaaaagccgagggaaagcttcccagggcccagcctccccatacaattcataggacaggtctagagtgaatgagggctactatatccataaaaagaaagagaaaggaaagacaagacaatattgcccagtgagtcaagcatgatcgtagcacaaagaagcagggcactcttccccagagcaggccagttcagagaggcagtccagggctatgccccagtatggctcccgccgtgctcctgcgcggtgtcccagggcctcctggcaccttcttatcatcagcctggggcgaaatgccagaccagatggtagaggcagaagtcaagcaggcaggtgccgtccagggcattccaggccagctgagtgtgcagccagcgcccaattcagacggcgccccaggccaaggctggcccgcttagggaccgcgctcgggctggacgtcgcgctcagcgcgcagggcccccatggacgtcgcgccgctgacctagctgtcagacatcgccacgaggagtaggcaggctcgggaggccgaaacgctgtgctcacctcgagcactgccaggctgctggagaggctttccggggcacagaagctgcagcggcgcggggcggtgggctgtgagcgagcatatgtaggggagcgtttcccgcgagaaagcagaacctgcgccagccgagggccctagggctgctggtaggaggactgttctctatcgtccagctgctcccgacctcttctctgaactggccctgctctggggaacagcgccctgcttctttgtgcgacgatcacgcttgactcattgggcaacattgtcttgtcttttccttccttttatggacatagtcctcgctcactccagacttgtcctgtgaattgtatggggaggttgggccctggggagctttccctcacggcttttagaatctcaacacccttgccgcccgccctggctgggtggagatacaaccagaagacagacaccgctcccctaaaccccagcctccagtataagctacaaaataaaaatgtgggcagggtgaggtggctcatgcctgtaatcctagctctttgggaggccgaggcgggtggatcagctgagctcaggagttagagaccagcctggccaacatggtgaaaccccgtctttactaaaaatacaaaaaaattagcccgacatggtggcgggcatctgtagtccaggctactttggaggctgaggcaggagaatggcgtgaacccgggaggcagagcttgcagtgagctgagatcgcaccactgcactccagcctggacggcagagagacactctgtctcaaaaaaaaaaaaaaaaaaaaaaaaaaattagctgggcgtggtggcttgtgcctgtaatcccagggaggctgaggtaggaggagcacttgagccagggaggtggagtttgcagtgagccaaaatcacgtcactgcattccagcctgggcaacagattgagactctgtctcaagaaaagaaaggaaaaaaagaaagaaaaagaaaagaaaaaagaaaatgtgaagctcttctaagtgcagctgctctgcaactatgcaagcccctgccccatgaagccaggcctgcccctaatcctttaccacacaaggctcattaaacttcggaaatctcggagttacttgctaggaaaaagccattccccacttccccatttgcataataaacggaggggcagggaagacccatctaaccaccccacgtgtacccatgtgtcacccttatcagatgcaggaggtgagctgagctgccaaatgcttggcttctttctggggctgtaatacagccatccctccccagggccacacctggagaagggagtggctaggacagggtcttcagggaaactgctgccttattctcaactgcttgtctcagtccccatccccccaacccccaactcaatatctaagagagagagagagtagttccaatagggaagtctcctgaaggaggctaaagttctgggtactgggtttggggtggacctaaagagttttttttcaattctctgaatgctatttcattgctgttaaatgatactcttcccctaaatggaaaggagacaggaaggacagactggtctacagttacacagaaagaacttccaaagtattagacgagcagggacagcagagggcgccaatgtggtgcaagggcactcagggaggagtcgcccacaagcacatttttttctcacacgctgcaaatctattcagaaccacctcacccccaacctcacacatatttcccatctcacaggcacatcagaggtcagagtgaggactccaggctctgattctcccactggccgccaagggaccttcaccagcccccaccgcactcctcaactattttcatgaacttagttagggcagctcccctcagtagggagctgggtagaggagctgagactcccaggttccctgcccatccagcggccctgtccatctagcgggaaggcgtttgctgcaatgttctttataatggggagtgagctgatgatacaacctgggtgtactgtggagccacaaaatgaaagttgcaaaggctgcccagtaacacggactcaggtttacactgaaatgtggacattaaaaagcaggaccctccattgttcactatgtcaatagcgcgcttgcatatagataaaggctgcaggggacacagaaaaattaaacacggattgaggtgaggtgttttttcttaaaaatacatcaaatttgtaaaatgattgcctctgggaaataaggttatgaataatgtttctttttctcctttccaaatgttctacaatgagcaagtgttatttgggtaatcaggaaaaagaagttcacacacacacacacacccctgaaagagcttgcttgcttccttccttcctttctgcttgccttccttccttcctttttttcttttttttttttcttttctttttgagacagagtcttgccctgtcacccaggccggagtgcagtggcatgatcttggctcactgcaacctctgcctcccgggttcaagcgattctcctgactcagcctcctgaataactgggactagaagcatgcgctgccaccacacctggctaagttttgtatttttaatagagatgggatttcaccatgttggtcaggctagtctcaaactcctgacctcagatgatccacctgcctccacctcccaaagtgctgggattacaggtgtgagcccccacccctgctagtcctttccttcttcctctttctttctttctttctttctttctttctttctttcttttctttctttctttctttctttcttttctttctttctctccttctttctgtctctttctttcctctctcttttttctttctttcctctctctctctgtctctctctctctttctttcctctctctttttttctttctttcctctctctctctctgtctctctctttctttctttctttttacagacagggtctcacactgttgcactgttgcccaggctggagtacagtggcatgctcatagcccactgcagcctccatctcgatctcccagactccagggattctcctacctcagcctcctgagtagctgggactatagacgtgcaccaccatactcccctaattttttattttttgtagagacagggtctctctatgctgcccaggctgttttcaaacacctgggctcaagtgaccttcctgcctcagcctctcaaagggctgggattacaggtgtgagccattgtgcctggccaagtctcttttttctttccttttcttttctttttcttctttctctcgctctctctcttttttttgaggcagagtctcactctatcacccaggccccaggctggagtgcagtggtgtgatcttggctcactgcagcctccacctcctgagctcaagtgattctccagcctcagccccccaggtggctgggactacaggcatgtgccaccatgcccagctcatttttgtattttctgtagagaccgatttcaccatcttgcctaggctggattcgaacttctgggctcaagcaacctgccaggcttggcccctcaaattgctgggattacaggtgcgagccaccgccaagccacccgcgagcctgttttcttaatgttgtcacaatgttaattaaggaaggaccattcctttccccaccaaagttgctcgtgtggctcttcttctccccaacccaattccccctcatcaccctctttaggggatccctccaccacaaaaccagaatgtaaatgaacacacttgcaaaatctgacctcgctctgatcccagtgtcctgctggtgtgagcctgggctgttgtggccaagatgctgagaggggaggggacgaccacgggggagtattcctgagttttctgcaggagaggaacagaacatatgtcacctctatcactgggtttttccacacgtattactgctattgttatttcaaaatgttcggggccagaagtttctgccaactcctgtaccaaaaaggctcctgtccttccctagtgacagtctccagctctctctgccggccccctccctcccctccctcccctcccccagattctctgcacagtccagagaaatagggcaggcatagagggtgggaagagggcacgcagcctccacaggtgctggcaggaaaggagttttttcgtctttgctggaatacagcagagatccaggctggggagaggtggagcccaggctattgactaacccttcttttgtgtggatttaatctcactctctgggaacacaaaagctggaatctctgcaaacctttccctgaataatctgcgagtcagcggagaatctgcgggtgaggaaagccagggcagatggaggctgggactcccagcgggagggaagtatgtggtgttgggaggaggtgagatggcacagaaagagcactgggaagtggagcaggagaccaaagttctaatcccacctgtactcctctctccttgctgtgaatttgggcaaaccactgccctctctgagccgcagcttcctcttctgtaactcatagaagtaacagaggatccctacctgcttctggggtcgagtgaccctctctgagaatgttccccagtctataaaattaagatcttgatatctatcccgcaccaaaggaaagatcagtccaaccttccaatcctaacagacaagccctgtctggtcccaaacccctctccagcctcacctccatgccttttctcattctgtttccttcacctgcatctcccttccctttttaagttaaagtctacttttctttgaagactcagtgcgggtctgatctcttgagggaggcttccccagtctctttcctacaggctgggttaggggctgctcctctgggctcctgtgctgttctgggcataaggccactgtggccttaacaactaagaattacagctgaggtttactgagcactcagtaagtgtccagacaggcccttcacccagcattaccttgtggaattttaaccacgctcttgtgaaggtattgctggttttctttttttctttttttttttttctttttgagatagagtcttgctctattgcccaggctggagtgcagtgacacaatctcagctcactacaacctctgcctcctgggttcaagtgattctcctgcctccacttcccatgtagctgggattacaggcacccgccaccacacctggctaatttttgtgtttttagtgagacgggggtttctccatcttggccaggctggtctcgaactcctgacctcaagtgatctgcccacctcggcctcccaaagtgttgagattacaggcatgagccactgtgcccggcagctgctgtttttatttctgctgtgttttttgttattttggtttttttttaaaatcatggtcgaaggctggtgattttcctgatcaggacactgagcctgacgggggtgaaagctgagtgtcgggtctgggatgtagaccccgggcagtgtggctcctactcctattctgaccctctgcctgatattctctctgccctcctgcgacgctgagcataaggtatgataggtttctgtttagggcaatgtatttgaccttcccctgagctgtgaacccaggggtgcagggtctcagctccctttgtgcctccactccatggctctcacagttccagcgggagctgcatctgaacctcatgttcccaggtttacagtcagggctctcctccttgcccttgggagcccaggaagagcctggatgtgccagggcccctctccagtgctaactcaatgttccatcccacccaatgctgcctccacacctgcctagggtcagatttaatccagctaaggggactctgcttagaggtcatggccacatgtgccaatgtgccaagccgtgggcccagcctcctcagactttagctcactgaggcctcagggcaatctttgagagagattgggggatgatttccatttcatagatgaggaaaactgaggctcagctgccatcacagagcaagtggatggagccagaagtgactccagggttatgtgtctcaaagccccttagctttcccatggcctcccttctgttcctgacagggccatgcgtgcaaacatccccagaggacaagagtgtgattaatctttgcatccgccatgggccagtggctacacccaggcactgagaggccggttgtgagagtctgggctgggcaggccctggttcacagcagactccaaataactgtttattggtggaggtcagccgggcagggattaccatctccagtttatagatgaggaagttgcaatcagccgggtgcaggaaagttgcccaaggtcatccgtgagtcagaagaagagcaaagacttgaactcagaacactgggggcctctgcagagtaagaggaaggaggctggggctgctgggctgggctctcccactcaggtggcctgggctggcagctttatgggccctgtaagtcgctgggacatgtcagcactcattccagctctaacgaccctaaatcaggccttgtcccctacaggtaagcagggccccaggtagtctaaatagtgacaggtgactggtttatggcaggccaggactggggtcagggctggagataaggctgagaatgttaagaccaggaacaggaagagagggccactcaccctgtgtaaccttgaagttagagatggcagatggagcaggaaccagtccaccaccccatcgccaatgtgcaggctctgtggtgcccataattaagatgcacccataagagagtgtatagctttacccctcccgcattcctcagaggggatgccctaccagggactcgttctcctcacccatctttatggtcccaaaatgcacccagggcccccctctctcctggggggcctgaatgcaatgaactttaaagtggatcattgatcaacagtcccttaaccccaccaaagtttcccaagcctctcccctgctcatcagggggctggccagaggtcacagggactccctgggggtggtttttattcccaggaacaggcttcctcagtcctgaaagggacatttttatagccctgtgaacacaaatgcactccccagaataggctctgggtgtggaatccctcctgtggctgtcatggtcgcaggctggtgattacattatacagtggtgttgacaatagagccctaagcctggcatggacaccccctcacctccctcctgcctctctgtaggatcaaagctgctctgtgaggctgtgtgatcctgggccaggagcggggagtcagcctcaaccctaagcaaggaggaagcatctttgcctgaatccttctgggggaggcaatcccccttcagaagtccctagcccaggttcgaaggtcggtagggactgagaggttggcagcggatggggagtggctaaaccagaaaaagggggcttcctgttgatggattgatggaggaggtccaggtccactgcctggttccccgtccctctcccgcaccccagcctgagcttcccaaactcccacagaagcccccaccccatgtgggacacagaggacctgcagtagcaggagggcacagctaagagaggagacaagaggcagcttgggggcatgggggggaccccatttccccaaatgttggagccgcccttaagggaacttcccctggactcctctggaggtcttgccagatgggagaaccaggggtccattcagaccccagtctcttctcttcccatctcatctctccacctggggggctcaaagaacctagctcctcccctttgaccccatcagcttctccctcaccgaatcctcttacaatccatttcttaattctgccccatcaaccctccctggtcatcacataaacaccagcaagggcagtagtttagggacagctttgctctgtattcgaagaaaggtctttggtctgcttagaaattaagtttggagcagcctgggaggaaatagaagagatgagacccagagaatcaatggccactgccaaagagagataggagagcctttctgcggccactgattcaacaaacggcatcacacgcccctcagcctctcatctcttcgaggccatctccacccccacccccacccccaccccaaggccattccaaggtcccattcaagaccactgcgcaggggtggcgccagaatgatcaaagtcatcatggggcactcatctttgtgtgggtcaagcactttgtggtgtcgtgtccctgttcccaaaccagggaccaggagtaggatgggggaggggcagggcgccgctgctgagtggagaggacgcggagtgggtgagggggccttgcgcacagggcaagaggtggccaggcagggcgggggaccggggagagcggaggatttcagatgagggacaggggaaggtggagaggggagggcaggccccgccagggggaggagccgcctcccgcgtccagctgtcggggctccctcccgtcgcggctccgctataaaacccaggccggcaggatcgctgcacccgcggcggcctcctcggtgcgcgacccccggctcagaggactctttgctgtcccgcaagatgcggatgctgctggcgctcctggccctctccgcggcgcggccatcggccagtgcaggtgagctcccgggctccggccccaggtgcccctcggcggtcccctccgtgcccccagctcccgcccctgcagaggatccccccgcgggcgaccggtgagcgtcggtggcgctggggtcccgggttgcgtgtgcgccgggggccgcgagggtgcgggaggactgggcagcgcgcgagcttgtgtgtgcacacgcgtgtcagcaccggctgggggagcgtgtgcacgggtgtgcgcggtgagggtgtgtgcgcgtggcccggcgagacgagttgggagtccctgataaggatgcgtctcaggccgggcgcgggtgctccagcctgaaatgccagcacgttgggaggcagaggcgggtggatcacctgagcccaggagttcgagaccagcatggccaacatggtgaaatcccatctctaccaaaaatacaaacattagccggacgtggtggcacacgcctgtaatcccagctactcgggaggctgaggcccgagaatcgcttgaacccaggaggtggaggttgcagtgagatcacgccactgcactccagcctggtgctccgtttaaaaaaaaaaaaaaaaaaaaaaaaaaaaaaaaaaaaggatgcttctcggacccgcctcaacgcacgccttcttttctcacccagcctcctccgtctgcccgtgggtttccgtccgtcccgctgggactcagcgctgggtgactgccccgcggccagagcaagggcggtctggcagggtcctggaagccgcgcttcccacacgggttccttgcccctgagggtcgcaagctcccctggcctccctaacctccagcgctgaattgggagcctggcgggggcggggggtgggggacccggagccccaaggcctctgcggagccggtctttccggacagggtgattttcgtttaaagattaatggtgaagccgagctcttaattattcctctaggtgggaggtggcaggaaaggcatgttaatatttgataagaagctaaaggcgcttcaagcggctgggcacagggatccgatcctggaggcaccttctttgcaaccccagaccccatcaccggaagaccccctctgccagttctcagcccaaccacccctcggatggttcttggggtccacgcaggctgaaacctcctctcccaagttaggtgctccatcctcaaagcggcggagtgaggggtgaaggtgtcctctgcacagagaggagccagcgtgtgccctttgcagcagggactggctgagctgtcttagagggtcgaggggcaccttgcagcctctccaccgggcccctgggagaagaaagagaaaaagcagaatgtggaaacttttatttgtagggttggacattggaaacctactaagcagctagaaagtagaaagagaaatgctttgcagttctggtgctttgtagctgtgtggtcttgggtaagtcacttcctgtcccatttgcaaaacaggtgttgtcattctgacttcaggggttttaagcgtttgaataagataatgggtttaagtgattagtgcggtgcctgtgtggcacgtggctggtgtgtcatataccaagtttatggggctctcccccaagcctggggccagtgtcaggaatgtgtctcagctcacccctcacacaagctgctatcccctttagtgccaaggctttctgactgggacctgccttccattcatcttatggaggactcaagctgagaagggaccaggttgcatatggcgacccccagagcatctctgtccattgagacaagaggccgggtgaggatatttggtccccttcagagccccagacccctggccgggagcgactgagactttgcccaggaaacacttgggttgtgctgagctgtttttcaggattatcccctgtccctcagagggggaggtggggtgagcaaggtccattagagaggcttcttcagccatcttgaaataagggggaggggtggcaggtcagtcagtgtggggggcagtagctgggtgacaggcgactgactttcggtctctaacctctggtcagggtggatggactaggtaggatgtggcgctggacaccgagacctctgggtaggtagcccctctccttcccaagccctcttgggagtggcctgagtcagtgggctggtacttacctgcaagggtggccctctcattcaacgaagacaggaacctgagtggtgggtgctcctgccaccagcaccccaccctcatccaccgacatggacctgacccctggccttgacctcaccaccattatgttttcctggctgctgcttcctgaagaaggtagttacaagtgcgttcagccaagcaggtcaaaagtctccatgattaagacagtggatcacaggtcaccactacaaacctaggagctgcggccagagccagggaagaccaaattcctaagaaaagctaagcctggaccagatgggccccagggaggctgtgaggcgagttacagggggctccaccctttgcagctggctcttggggatgctggctgaagggaggcttctcctggaatggctgcccccgggccctccagtcagagaagaggccagcccaatcttcaaaaccccttcctccttcaagacctctgcgggtggggacatgggatgattatggcaaggaactgtcatggtgcaaatgccctctgatttattatctccttagtcaccagcactgggaatttggtggctgcacctgtcagaggcgtttgaaccagagtgactccattttgggtgagagctaggaaaatgaggccgagatttgctgggctgcattatcagaaagtcaggcatttctagcctctagatgtttgcagttaagggaacaaattaataatatttactacacagacccagacttgggaaggtccagatactccgatatctggagagcaaaggcattcctaattttgctttaaaaataataatgttggctgggcacggtggctcacacctgtaatcccagcactttgggaggccgaggcgggtggatcatttgaggtcaggagttcgagaccagcctggtcaacatggtgaaaccctgtctctactaaaaatacaaagattagctgggcatggtggtacatgcctgtaatcccagttactcaggaggctgaggcaggagaattgcttgaaactgggaagtggaggttgcagtgagccaagagcccaccactgccctccagcctgggcaacagagcgagactctatctcaataataataataatatcaattcttggataatgtagtaattaagaaaattaatcctttatcacaaacccttgtagcagagcacatgtccccatatatacaacgcattgaatgcattccttccttctctgacttttgggaatgtcctactctgtctatggagtagctgtcctttcaccactgtactttcttaataaacgtgcttttcctttgcactgcagactcaacctgaattctctcttgtgcaagatccaagaaccctctcttggggtctggatcgggacccctttcctgtaacatgccttctgtcagaggaagattatgggactcagaatgtcagataactcccctgtggagactgagcaaaggcagagcgggagctggaggcttcggagctctgccccactgctggggtggcgagtggccactgccctctgcagaatccacccacatgggggtggttcaggtgcagcaactcccagggacagcagagccctgcccggggctggggatgggccatcagggggaggacactgcagctctgaaaaaggcgatgccagcagggaaggagaggcagtgatcagggcagggaaactccaaagcccaaagcagctcttcgtggccagttagttttcctggggatgctccctcatggctccttccccatcctgtccccactccggggactctaccctggcttagactacaagaagatgggactgtgggggcagcccaggcaagaagggagagggtggatgagctcagagacctcagctttggctgagtgggaaccgtgcttttcttaggaatttcctcatcttgatttctttccaagtcacttcatttctctcctctctcggcccctccttggctttggccatctgctcccaaaaggaggccatggggtgggtgggaggggtgggggggagggaaggagttgtcgatgggattttactaagtgccaagccgcctgaaacctcatttaatcctccccaaggccctatgaggtgggtatgtttgtctcatgttacagatgatacaactgaggctcagagagcttaagggacttgcccccaaacccatctaagccccctgagcggctcagccagaattccaagctctggatgagatgttgtgttcgccctgctggtgcagccttttaaaaaaattaatagactttatttttagagcaattttaggctcacataaaaattcagcaggaagtacagagggttcccataggcccttctgccctgcatgcactttcccctcttattaacatcttgcatccatgtgggacatttgaggtgcagcctttttttcagagatgctgggttctattgccctgaggcagagccctcagcctgtccccagagatcaggactgtgcggttgaggggcaggggaggaagcctggctgctttcctcctagcgggagctgtgagacgctagccaagaagggatcttagtaacacagggtgagacattctggggaggggccgcctaatctcctccctcatcttggatctgggaaggctgcccggttgaacctgactctattgtcccaggagcggaggctgggccaagtcctcctcttctcctctcaccagcctcttttccaggtttggggtgggggaggtaagcgcggaggaggctgctggtgaccaaaggatggagtatccaagccagccccatgttagagatgagtggcctcagagggcttccctggagggccagtggctgcttggcctggccctgcctggggaacagagccctatgccagctgacctgttgatcagcccctgcttggttttcaattgagtctctttttctgggccctcaatcctgctgccaggaacactccatcccagcccaagaggggctccaaccccaggggtaggcccagcctctgatcctcctgtgtgtgtgagcaacaagacacacgcacgcacacttcacacccttcctctctgctccagagtcacactggtgctacgaggttcaagccgagtcctccaactacccctgcttgggtgagtacagccagtccaggggactgctctttgtgcatggtgggcaccacgcaagccgaaatggagaccccggaagagtgggaaggggaggggtgatggtggcttcccaggcagatatcagttcccagcatacacacacacacacacacacacacactctctctctctctctcacacacacacacacacagatatacaaacacacacactcacacagaaacacacacacaacacacacacaagcacacactcaaacactcacactcacacatgcacacacacactcacactcacacaaacccacactcactcacacacacaaacacacactcacactctcctgtcctggtgctcagggaccagggagcatagagtgacctgagtcttcactggcacctgctgtcatcgagagggcatgttccctgtggaataaatcggtagcagcattaaaggaagaaaggcgttttgctgtttcccataataaaacggggagttgtttctatcccagtgacaccccttgcagggtgcctgagtgatggtcctttacgcttttatttgaatgctgaccaattcgaatgcaaaccctgcagtctgctgtgttttggtgactgagcagtgctgcccgctcctgaccctggcccacctggtgttggggtcaccagggttcggggaaccagctcctccagggttactcctctccctcccattcctcagatgatgctcagcgcccttcatcagcagcccccccgggggtcccactccacagtttccaaagccctctccatccacctcctttaaactctctgacatcccagggaagcggattatctctgcagttcccattttacatttgggaaacccagggcttggagaggccatgtgcaccacctcatgaagttgtccctaccccggagctcacagtcaacagttggcaaccctgttcccaccctgttccacactggggctagactccccagccttgcatgtatgtttctgtggaggaggaggaggagggcccagggagggcgagagtggagttcggagctgagcatccctgcagcacagccttcaggccaccccaaagcgtttctgtgtgggaactgagtgggtgggcctgacttcagtggggtggtgggggctacaccttggtgccaggcacccgactctcagcccaccttctctccctgctcagtgccagtcaagtggggtggaaactgccagaaggaccgccagtcccccatcaacatcgtcaccaccaaggcaaaggtggacaaaaaactgggacgcttcttcttctctggctacgataagaagcaaacgtggactgtccaaaataacgggcactcaggtgggctggatggaggccccaggcaggcctgggcacccgagttccccaaggactgagaggatggggctcctcccaggagggtgtgccagacccaggcccatctgtgctgtgaggtggctgaaaatcccatgggggaggacagcttccaggaggagagagcactctagtatgttttcgttacttttgtcagaccagtctgggatgtgggggcaggaaacgttccaggaagaaggacatgtgcaaaggcgcggaggcatggaacagctcggcgtgttcagaggactgccaggagctctgtgtggaggaaggacagacagtgaagccaggcagagcccaagcaaggcccaggggcagctgggctggggcccaagggcagatcacccaggcctgaggagtttggacattaccccgaggacaccagggcaccacagaggaggtggacgcagaggaggcaccaggacagagctgcagtttggggcagtggagggtgcaggagagggggaggcaggcagggagaccaaggaggaggccagggaaaggtccggggctgtcccaccctgtcccaccccgcgccacccctgcaggccagaaccagagctcatgaaggttgggaggcaggagacaatgtcccatctgggtgaagctgggatgaagagctagaggaggctgagggaggctggttcgaggactctgccccttctgtgctcccagtgatgatgttgctggagaacaaggccagcatttctggaggaggactgcctgccccataccaggccaaacagttgcacctgcactggtccgacttgccatataagggctcggagcacagcctcgatggggagcactttgccatggaggtgagggccccttcccgactgggaccttgtctgggctctgggcgcgcacctgccttgggcaaggagggtagtccaggcccttcataggtccccttttcacccctccaccccgaccagatgcacatagtacatgagaaagagaaggggacatcgaggaatgtgaaagaggcccaggaccctgaagacgaaattgcggtgctggcctttctggtggaggtgggactcccatcccccacttcccggggaacccggggctgagagcttcttcttaggattcagagacctgggactccagcgaggcaggagggggcggggagactccaacttccgcctctgtttctggggttgcatgtccccgggccaggtggggagcccagagcctcaatcccagaagctgcctggccttccgcccccagatcgggagaatgaactggccaccaccactggctccctgcagactttctcaagacccttccctccctttccaggctggaacccaggtgaacgagggcttccagccactggtggaggcactgtctaatatccccaaacctggtgagtcaggatgggggagaagggcttggggtgaggggggggattcctcccacaaaggaaggggtgggtgtgcggggagctgggctctcagagtgcaggggaagaggggctccttctcccaccctcactgacagtgtcctctgcccctatctcagagatgagcactacgatggcagagagcagcctgttggacctgctccccaaggaggagaaactgaggcactacttccgctacctgggctcactcaccacaccgacctgcgatgagaaggtcgtctggactgtgttccgggagcccattcagcttcacagagaacaggtgcacagggcctggggcagggcatgggctcccactgcctggctccccagaaattatccctctgtctgccctcagaggtccctcaggatacaggtggggagcccaggtaactgaagtccgttgttaatcatcgacattcactgaagacaggcaagaaaagcctgagctgttccatcaccagattgggggctagacaggaggcaggggaaggtggagtcattcagaaaatggtgctggggtttctatcatgaacgaggctctggggagacagcagtgagcccaaaggacccaaatccctacccttgcactgctttcattccaaaacagtggttctcaaagtgcggcccctggaccagtggagtcaacatcatcactgggggaatttgttagaaatgctaatcctcagagctactgaatcaggaactctgggggtggagcccaggcatctggggcccaacaagcccgccccccagctgatgctaacgcatgctcaagtttgagagccacagtcctgtagtaagagtgacaagagaagcaggcattgcgggccccctggggtgtgagtgaaaggaagccaatgggcacttagccttcacccatgccacgcacctcatttacatcccctattcttatcatcttcacgaccaccttgagagccaggggttcagagcccctctttcctaatgagggctcccaggacaggatgaggtgcctgcctgaggtcacacggcagggagtgcagctccccctgccccgacctgctgagccccatcacttccgcagatcctggcattctctcagaagctgtactacgacaaggaacagacagtgagcatgaaggacaatgtcaggcccctgcagcagctggggcagcgcacggtgataaagtccggggccccgggtcggccgctgccctgggccctgcctgccctgctgggccccatgctggcctgcctgctggccggcttcctgcgatgatggctcacttctgcacgcagcctctctgttgcctcagctctccaagttccaggcttccggtccttagccttcccaggtgggactttaggcatgattaaaatatggacatatttttggagaaacctttctcaagtgtgtttttagccttccacaactaccccaccctgtccccctccacccacccctgttcctcctgttccagggcgggggctttaaggccaggagatttctcccaagcaggtaccaccaggtgtccccactcccgttctatgtgaattccgtgtctataccccactcccttctaccaggacctggaccttggagagatgctgaaggcatcttggagcttcatcacagcggaagctagaggagttccaatctgatctcttcatcatatagagggggaaactgaggctgagaaagacaaggttggggccgggcatagtgattcacgcctgtaatcctggcacgttgcgaggcagaggcacgtgaatcacttgagccctggagttcaagaccagcctaggcaacatggtgaagccctgtctctataaaaaatacaaaaattaaccaggtgtggtggtgcacacctgtagtcccagctactcaggaggttgaggcaggaggattgcttgaacccaggaggcgaaggttgcagtgagctgagattgtgccactgcactccagcctgggcaacagagcgagagagaagaggctgcttggctggctggaggccatatactgaggctagggcagagccgactgcatgacggcagccccagccctgtgcgttctcccctgtgctaggggtgaaagggtgtcatgtgtggggatggcctaggcaaggtgggcgaaaggaagttcatttgtttgctcaaaaatttattgagcgtttatgctctaggcactggggatatggcagagaataaaagacaaaaatgcctgccctcctggagttcacagtctagtggagagacagcccataaatgaagcaggcatgttgtctaatagatcgggaggcagtgagtgcatgggagaaagagaattcagggcagggggccgggcgcagtggctcatgcctgtaattccagcactttgggaagccgaggcgggcagatcacctgaggtcaggggtttgagaccagcctggccaacgtggcgaaacaccgtctttactaaaaatacaaaaattagctgggcatggtggcgggtgccggtaattcagctattcaggaggctgaggcaggagaattgaggcagagtttgcagtaagccaagattgaaccactgcactccaacctgggtgacagagagagactctgtctcaaaaaaaaaaaaaaagagagaattcagggcagggaaggtgggaagccctgggggaaggggcggctgggaggaggccagagatggaggcctctggagactgcaaatgttgaggtgcggcagggagggagccttccagagaaacagcagggaggagtagagggagggagggagggaggaagcagggggaggggaggcaggagagtgaggtggagggcattggtttggagcagggaggggagctatagaggtgaaggcagaacgcagggacagttcaggggctgccgcagtgcccaggagctgatctgctgatgggttagcagtgagatatgagggagagctcatgggggtgtccaagggtgtggggcttggtcccttgggacttgtcaggaaagtccccaccaccacggtgattacatctctaatgggttgttttccctcctgtggccagagggaagtggagggagagactgggaggaggctggtgagagggggtccaggacaccagaatgagaaggaaagaaggggacccacgcggtccccaagccaggtcaggccccaggtgccaggaactgagggcccgcagctgtcagacctcatcatcaggagtaggactggattttggaattcgtgagccttggagtggggttggctgagtgaatggggcacccaggtttccctggctgggtgaggacccctttggcaggctgagagtccggaggtagagagcttcctcacaggaaggcgtgcccaccaggagggcactgagggattccatcacctggttctagaatccctcgctggctgtgggaggggagctggtgggagaaggtggtctctaagccttctctcaccccgagccccccatgcccctgaccacccccagtcagcccagggagaggagagacggctgctcccctccctcctccctttccctccgtcttcccttttgtaaccaaaaataagtcccccctcccttccctggtgaccacgcagctgtgggggaggggtggtattgctgttgccatggcaaccgcaggccgcctgtcagcggggggtgtgtggacgcagaacctggaacctgttctttggttcccacacagactgcaggggatctaagctgccccccaaaggatcagggctctgaggtcagaatggcccctcccagctccccaatggcactgcatccccacccccatccctgccctccaggcaaccttagtgaataatgtggcagcaggaccaggaagtcctggcctttccaacctaaggcagaaggtgttcgaccctccccatccccctggtccctaaatcataaatccggccagcaggagccagaacgggcacagcttgtccagggcctggggctctggccacctcccatgtcctgcctgccctccctgcggcccagaggccacagcaggtgctgccagcactcaactcccagccaagtcaccagggccagtcacagcagaagtgggcagctcaccccgggcactggcccccacctcccgaggccgccactgatggcattccttcctgtgaacatgcgtgtgttcatgacgagcttcctgtttttagtaaattcactccctccatgcggcctccaccacccccagcagacccccaccctggggatggtggctctgagttccctgtgcccagtctggcctggcttctgagacagttccctctgagggcgagggaggagaacccccttattcacaaagagggtccagcctggcccctgagccctcctttcattcatttctgaggccccgtgggtgactgcatggggtacacacacacacacacacacacacacacacacacacacacaccagccttcactccttcactgtagctggccaggcctggggaaggctcacaggctgatggttttgcctgcaccctgacttctctgagggtcactggccggcactcagcacagcataaagcacattctggggtgcccatcgtgttccaggtgggggccgtgctgcaatcccattggggtggtgttatccctcccacagcacggataaggaagccccaaggcacagagagggacggggcacttgtcagaacctggggccactcccctgtgcctccttggctcccctggccggctctctcctttggctgagccatctgtgtccaggggcagggtgggggctgcagcaccccgtcccacccatctccgctggttgctctccatccccagtgggccgcctctttggccccctgtttagattcagcatccgggtgggagccaggggctaaaaatattcctcatgtgtttagatggttcttggaaaataaacttccccatcttggctcttggtttgcacacttgctggccctgcttcctgtggctctgatctgacaatgtaggggtgggggaggaaggtggggcggaggagggtctacagggggcccagagtcgtgggggctgtgtggacgtctgcccatggttcgtgcaggctgccgtgtcttaaaactccagggggcgcctataccgacagggccttgtgaacggtgcccccagcgtggtgcaaccctgaggctctgagcttgtgtgtgtgttggggtgggaagaggcaaggaagctagtggctccatgggcatggaggcatgctccctgctctgggcctcagttcatccatctgcagaaggggctacccttggtccccccatctaattgggcaaggctgtcccgggctcctgctgtccccggtgacctcagaaggaaggccaggcctctctgaggttggggaactgttcctgcacctcgcactacacatgtcctagccgctctgtttgtttatctgagagggacaaaggcattctttcccccagggacaaaggacgatgtccaaggcccagggaggggcttcctttggagaagagctgcgggacagaagagtcagttccttccgcagagccctcggctggacacgtgggaggctcctcaggttgttccaagtgtcagctgcggcaaggcctggaggacaggaagagggcagcggagcaggacacagggaagggatgtgggtgcattctggaacaagatttaatcttccatcaagatttagtctttcagccaggcgcagtggctcacacctgtaatcccagcactttgggaggtcaaggcgggaggatcacttgagcctgggagtttaagatcagcctgagtaacttagggagatcctgtctctacgagggggaaaaaaagaagccagacgtggtggcacgcctatggtcccagttacttgagaggctgaggtgggaggatggcttaagcccaggagtgcaggcaccattgcactccagcctgggcaacagagagggaccctgtctcaaaaaaggaaaaaaaaaaacaaacgtaatcttccttcctccctccctccctccctccctccctctctctctctctttctctttttctttctttctttctttttttctttctttctctttctctttctctttctttcttccttccttccgtctttccgtccttccctccctccctcctttctttctttctttttctttctctttcttccttccttccttctgtccttccctcctcccctccctccagtctgtctgtctgtctgtctttctttctttctttcttttttctttttctttctttttatacagtctcactctgttgcccagactggagtgcagtggcacgttttcggctcactgcaacctctgcctcctgagttcaagtgattctcctgcctcagcctttcgagtagctggtactacaggcgcatgccaccatgcagctaatttttttcatatttttagtagagatggggttttgctatgttggccaagctggtctcgaactcctgacctcaggtgatccacctgcctcggcctcccaaagtgctgggattataggcatgagccaccatgcccggccttaatctttcaacaaacactattatttcctctgtgccagggacagaggatttagggaggaaaatcctagtctgggctcttcctccgagactcccaactgtagggcaggcagacacagcaggcacaggagcaccaggtttacgacacagaagccaagagaggaatgcagaaacatccgggcatgcagcccagactcacaccggcctggggtggaatccccctccattgctgactctctaggtgcccttggtagtttaattcatttttctgagcctcagtttcctcatctgtgaaatgggggtgatgacagcatttacctcatgggcttgttgtcaagatgaaacaagatgccgggacaagaggagatattcaataatttataattattatgatgattctttttattggagagggcaatgaaggacaggcaagacccacaggtggggagtagggaacactgggcggaggctggaattatgcagagtgatgcataatgaactctgatctgtggttggtggcagttctttcctatccaagggagaaaacttaagacccttcaaggggccacctctctgcccagacacttagggacatccctcagcactctgtcccaaccgtacacagaacagtttacagaggaagatctcccagcctgaccttcacctagaattgtctaaggtcacccagagcatcagagggagaaaagggggccctctgagccccaggactgccctgcagttcttatgtcctgccttagggggtagcaggtgcagagttcagagtcaggctgagcccacatccctgaaagaaggggctctcggccagggctcctcctgctttctcactgtggggattgatcgggttggggaccaatttcccatttcattttcctctaacgcttcctctcccccttccccaggagccgtgggattacacacatgtccatctctctgcttctggctctgtccctggctctgcctcccacaagcctatcctgtgtagagttgctgcaggctcccccagcacaggatgagtgcctgcccctgtccccacccttggcttcagttttgtctagatgggttcacctagacaaaatacaggctgcccagttacatctgaatgtcagataaataacaaatctctttttttttttttttagtatatccctaaattacatgggacatagttacaccagagcattatttgttatttacctgaaatttaaatttaactggttgtcttgtacttttatttactaggtctggtgaccctacctccatcccacttataagaggaagactgaagccaagagagaagggtgggcaagagaaagagactgacagcccaggcctgctgccactccttcctcctcccggtcacctccctccctaatggggcacaccttctagtaactgataacagactgatcaaggggttttccctcctgtgtgattctggtgttgggcttcctgtgggcagggcagctgggagggcattggaggcccatctgcctgtagatttcctcctcgctgactcagcctcccaagtagctgggattacaggcacctgccaccatgccgggctaactttctgtatttttagtagacacggggtttcgccatttagccaggctggtcttaaactcctgagctcaggcaatcctctctcctctgtctcctaaagtgctaggattacagccatgaaccaccatgcccgtcttgaatttttgactgtgtgtctttaggatagatttctataagtgaagtttctggttcaaagggtaaatgcctatgtaaaattgctagatattgacacattcctcaagaaactaatttctattgcatctggcaaaattatttgctgtgctttatatagcacttaatccttagaataacagtcagagatgagtatgtctattttcttcattttcagatgaggaaacgaaatacacaggacataaggctaacaaatagagctgagatttggccaggtgcggtggctcatgcctgtaatcccagcactttgggaggccaaggggggggcggatcacctgaggtcaggagttcgagaccagcctggccacatggcgaaaccctgtctctactaaaaatacaaagattagctgggcatggtggcatgtgcctgtaatcccagctactctggaggctgaggcaggagaattgcttaaacctgggaggtggaggttgcagtgaactgagatggtgccaacgtactccagcctgggtgacaaagcaggactccatctcaaaaaacaaaaagaaaaccccccaaaaaacaaatagagctgagatttgaacccagaaattctgatacttgagtccgcacacttacaattgctacattgtactgcttttctgaagaaaattgagaggtaaaggaacttgtcccttgccagcgaatgaatgacaaaatggggaattgaacccagatctgcaaacccagcagtccttgctgcttcccttatactgagtgctgctggcctccaagtgtttcttgttctgtgtttctacatggacgcttacagggaagcatgggtgcagaaatcgccaggccagtcaaggacgctgggatgtgtgctgaccctagccctggagcgctctcccccaccactccccgcagtcttgcttcctcttgtgaagtctacgtgctagccaagacccagcctgtgaggcctgacctgatctctgctccttgtctgctcccccagcaagagtccctgaggaaaagaatggggaatcacgtcttagtcatcagagcatcgaagtgcccaggccaaggctggccacagagagggagggcaggtggcaaatgtttgcagcacgagtgaataaaaggaaaaatgatagcaaagaatggaactaccaggcaccattccagggctgggactaaatatttaccttgcccattgggcaaagataagcctggttttccaggctctatttatgccagctttccttcaggggctgacacagtcaacctggtatcattacagcttgaacagcggtttccacatgtgggatctgggtgtacaaggtgcttgattctcagattctgctattccctagctccatgtgtcttcccagtccttgagccctaggtggctttgcacctccattctgctgcctggtctgtccccagtctccatgaggctattgaatcggggttcattctactctagatgaagctgtgtatcctcgtttagcccctgaggtcaagccacatcaggagctgcttacaacatgacaggacagacttgcctgggtctactgcctcagtggcctcctgcgagacacctctcttaagggaatagggttgggtatgacaagctgggtccaagtgaagcttcagagatgtagagatgtagagatgtagagatgtaggggaggagggactctgagttcagtgtggcaaccactcagcctctgggactcacaccaggggcataaggagaatggaagccgcatgtggaaaagggaagggtaatttctttttattttttgggggggcgtggggaagggtgatttctttttttcgggggggaggaggaggtggggaagggtgatttctttttttggtgggaggaagtggggaagggtgatttctttttattttttgggggggaggtgaagaagggtgatttctttttttggggggggcaggtggggaagggtgatttctttttttggggggggcaggtggggaagggtgatttctttttttgtggggggcaggtggggaagggtgatttctttttttgggggggcaggtggggaagggtgatttctttttttgggggggcaggtggggaagggtgatttttttgggagggggtggggaagggtgatttcttttttttttttcggtggggaggtggggaaggtgattttgtggaaatacgaacagctctgctttgggaaagccttcgtggagtgtgaagggagcagtgagcaactctggcccctggtgtcctgcctgggaggcaatgcctagaggcagtggtcacgttgggtgaggggtgcccagaagatcgggtggtccctctcagaggacaccacgtggcagctgaaaggactagttgaagagcacacttgagataccctctggaggctgccatcagtactttgagggagagtgggtctttgcagggggataaaggagaaccaatgaaacctgagtcattacagcgagtgacctttcactgagcctgaggctgctataaccaggaaaacacagccagtgtggaagcagattcacaaccaggcacggtgactcgcgcctgtaatcccagcagtttgggaggccaaggtgggcagatcacctgaagtcaggagtttggggccagcctggccaacatggtgaaaccccatctctactaaaaatataaaaattagccgggcatggtggtgcatgcctgtaattccagctacttgggaggctgaggcaggagaatctcttgagcctgggaggcggaggttgcagtgagttgagatcatgccactgcactccagcctgggcaacagagagagactccctctgtctcaaaaaaaaaaaaagcagcagcagcagcagcagcagcaacagcagattcgcagattcatggagatactactgcttggaatttggtgatgcttcagggagtggggccggagctggcctatgctccagacaggcataaactatcaacgtaaacacaattacacctaagcctctgcaggcatggtgctgatgctgccccctcccaagggggtaccatctgggtgggtacaggccctggaggctgacttttttattttttttaagatggagtcttgctctgtcaccaggctggagtgcagtggctcaatctcggctcactgcaacctctgcctcctgggttcaagtaattctcctgcctcagcctcccaagtatctgggactacgggcatgcgccaccatgctcagctgatttttttgtatttttagtagagatggggtttcaccatgttagccaggatggtctcaatctcctgacctcgtgatccacctgcctcagcctcccacagtgctgggattacaggcgtgagccactgcccccggccaatgctgacaattttcaagtcagctatggagtttgaattttcctccaaatttacactggctatttccccagttcaaattaggcctgactggtttctctttctctttctttttttctgaatacatatcagttttggattgaggcctaacatttccactaccatccagaggagagatgagaaaaccagagttgggctcttaatcccaggggaaaaaacaatgggctgctctggaacgctgcagagtcagggttgaatgaatgcaggagcggggcaggcagctagggagtgtgtcggccacgtgatgagcctgccatggtgtccagatggacatgtggtatttggtttaaagcccacgctactggggcataaacagctgaggataaatgatcagactcaattgttctctcctttcccaggaaaggccaggaaggaaaaggccccagtttaagggagaaggcattgtcctcagtggatgaagcatagtcaggtagcccggtctggcagggggccagtggggagcacgagattctcatggctgctgtggctggtggccgcctttacaacaatagcatattggactcctgtccttcccatcccacctctgaaatgatcacacccatgttaaatctctgataagatactatcagatactccaaagtccagtttggaactacagtctttgcttgactcaatccagaatcctttctctctccctggtcctatctccccatctaatccccctcaattcttctttctatccagctgctaaggtccctgggccatcagaagcgaatagaacaaacctaagacatcactctccatcaagaggcctgcatgactctttatttacatcatcttccaggaagaggaggaggagctgctttggggacacccacttcctctccttacgtaacaacacactgcatttgcacaagtgtccttggttgtaaagggttccacactcactttcttattcagggcttattacaagcctctcaggtagctatggtcatggtaccctgatcccttgtcaaagatgagcccactgaggctcagggtgactaccgttgtgccaggagttgctaagtggtggatcacagactccagttcagggggaggtagggtggtaaagaagcagctggatgaacctgggtttgaatcctgctcagaaatgttccatctgtgtgacaccacaggcaagtgacttaacctgattgagcctcagcttcctgatctagaaaaaagggtgatcatgcatccctcatagagctgtggtgagcatttacgaatcacgagtgaaacatgcatagcatggggtttggcagatagaagtccagtaaatgtctaagcccatctccagcgtttcttctggttccaagctcaggactatcctttaagctaagtggtagatactcaatgaacgtgttttggatgatttagccctctcctttcccccatccctccccaagtgagaggatgtttatttgcagctctgtgctgcagagagctctgcaaacaaggattggcagcagtaactttctccagctggcacaacaatgaaaggccacaggccctggggctgctccctatggatgtccagggaacagaggccaggcagcaggctgactgctccgggcactccctgtggcttcttcactctagctggctacccagtatactgagtagcaaaatggcctttgaaaaggcccaccctgtggccatgatttctagcagaccaaatgagagtgttctcctgggagcactgtcaactcctcttgctggagacaattctctgggagctcctcagaccctactggagcactgtgtgcttggctttctgaatgcttagaggtgacaggtgctttagcagacatccaatccacagcggttgcccaggcagcactacaccccccactgtcacttcaaccggagtaactccaacctcatctgctttagctatgggtccttcaggtaaatgtggctggaatggctggaagaaagggtcgggtctcaatgttgtttcaaaataaaagctgaagacaactgacctaatgcaactcgctcaatattcacagggggaaccgaggcgcggacaaggcaagtgacccccaaggtcatacaattctgccaagtgctgagcaaacactgcggactggacttctggtctactgctttccatggcatcagctaagatgactgctctgaacctggggctgcggcagcctctgatgatggccgtaggtatctcctactccattctggaggctccctgctgatccctaatgtggaagtccccctcttcctccccagtttgtaatcccagtgggcactgaggtttggccatcagcagcagaggatcctgctacagataactgaagggtggtactgaaaaaaccatcagatcagcagagaagccccgtccccttatccccaaggtccttggacaactcctccaaccaggcacatttttccttcctgggctgcactcagctgtgactgggctcctctctctggcatgcctcctccctgtccagagctcttctaggttttcccccttctgcctccttttttcttcctcctccacttccttcagtcttcttggggcatttcaagcctagcacccatctgtgagttcctcttgggcttgttggtaaggtctaaagtttgttatcaagagaaattccagccaaagtggattgtgaatatgaaaaagagagaaattacagcaaacagaacttatgtttataataaaatggtctaaaatagatacatatgtgccgtgtggtggctcacacctgtattcccagcactttgggaggctgaggcgggtggatcacctgaggtcaggaattcgagaccagcctggccaacatggtgaaaacccgtctctactgaaaatacaaaaattagccaggtgtggtggcgtgcggctgcaatcccaactacttggcaggctgaggcaggagaatcacttgaatccgggaggtggaggtttcagtgagccgagatagtgccacttcactccagcctgggcgacaagagtgaaactccgtctcaaaaaaaaactaaaataggccgggcacagtggctcacgcctgtaatcccagcactttgggaggccgaggtgggtggatcacctgaggctgggagttcaagacgagcctgaccaacatggagaaaccccatctctactaaaaatacaaaattagctgggtgtggtggctcatgcctgtaatcccagctactcaggaggctgaggcaggagaattgcttgaacctgagaggcggaggttgtagtgagctgggatcgctccattgcactccagcctgggcaacaagagcgaaactccgtctcaaaaacaaacaaacaaacaaacaaaaaaactaaaataaataaatacataaataaaatggatatgtatttatacaaaccatagaaaaatgtttggcaactatcccaagatacctgacaatgtgaaatacttttattacaactggcctgaccttcaaaggccttcacagctcctgccttcctgttacagtctactatgttcctcatgcaccttccactcagcacaaacaggctgcactgcctctgaaacgcatcacttgaatcctgcctctgctcctttgtccatctgaatcaccctctccacatttctgacccagtaatcctaatctcactttatgaggcagttcgcttcccttttgcatttccctggggtacactgtcaatagcctagtgtctgatgtcatcagtcagcacttcatcagaggcaattatgtctacagagcttttggctaattactgtcactccttacatgtgtgcatatgcatatcatctttccctaatgagactggaaataatgattcattccctggagcagtggtttccataaatgaccaacccacagaccagtgcaaactggctgtgaaagagcttcctctgaggaacttattagaatgcagattcttggactgcatgggagaggaggatctcataaatctgggtgtaataggcacagaacattaggtgtaatatgggcaggactctggactcagcatatccaacaagctgctggctgattccgatgatgccgatgaattgccaggttgggaactgttgcccccagagaaactagcagagagctctgtacgtggtaggtgctcactcccctattgtttgggtgtatgcctcctgataatgaacttgaacataacattattgttatattatgcctgtattgtttccttaagtgagggaagaatgcttttgagtacctaataggtggcaagctctgtgcctacttacatacatgatctattccttttaataacctttggaaatgaagtggtattttcactgggcgttagaaatctgaaaactttcgtttacagctgttgcaacagcagaactagaatgtgacctccgacataatgggctcaaagtctatgacctttctgctcaccagagggcatgaactgctggtttgtacctggcttgcagataccttctttgggcagcacaatgttcaaagttaaaaaaatttaccaacacttctaaactggatactttgtattaatatctgggtttctggcttctcttcatgggaaaaacaaaacaaaacaaaaggtttggtgaacactggggcccacattcctgcaggacaacagtcacatggagcctttagatgggcatgtgcctagaacacactagagtccccatcgctccccattctcttacattctattcccaaccaggttcttataggcctgggtttgtgactgctgcacacttatctactctcttgcttcccactggtcaggaagtctggcaaacttaaaaggcctctttttgttgctctctcctgtatggatctctgatcatagaggtgtgtgcatttctgtctttgtgatttcaatactaaggaagccgttggtacattatcaagagaaactgggatcgccactccccaacttacacattctggtgtgtcccagtaaaattctgtactcagcctccaaactagctgggaaaaatgtggcaaatcatctacttgctccaattcaatggtgtttagaagtaagaagtcactgtgagcaatgccaccaagtggtggagagactccatgcagactcaccaccttcagccagggaggctgggaggccgaagacctctctcaacgcatagggccattcagaaactagaaacaaaatgcttgcccatctccctaggccagtccttccgaggctttttgagacaaggtctcactgtcacccaggctggaatgcagtggcacaatcaaggcaacctcaaccttctgggttcgagcgatcctcccacctcagcctcccgagtagctgggatgactacaggcatgggccaccacacccagctgattttttttttttttttttttagtagaaatgaggtctcaccatattgctcagactggtcttgaaccagcccatttttagctttttaaaagacagccttggccagccatggcagctcacacttgtaatccctgcactttgggaagctgaggtgggcagatagcttaagccgaggagttcgagaccagcctgggcaacatggtgaaaccccatctctacaaaaaatacaaaaattagctgggtgtggtggcgcacatctgtggtcccagctactggggaggctgaggtgggaggattgcttgagcctgggaggttgaggctgcagtgagccatgattacctcactgcattccagcctgggcaacagagaccctgtctctatttaaaaaaaaaaaaaagtgtgaacctaggagttggagtttgcagtgagccgagattgcgccactgcactccagcctgggcgacagagtgaaactccgtctcaaaaaaaaaaaaaaaaaaaggaaacctaaaaacagactggcacttaaaagagttgtgcttcattttttgactttctgtattaattttctgtttgttcctttccttaaacaagctgccactgctgctgattgaacatgtttcattttatacattttttttttttttttgagacggagtttcgctcgtttcccaggctggagtgcaatggcgtgatctcagctcactgcagcctctgcctcccgggttcaagcaattctcctgcctcagcctcccaagtagctgggattacaggcatgtaccaccacgcccggctaattttgtatttttagtagagacggggtttctccatgttggtcaggctggtcttgaactctcaaccttaggtgatccacctgctttggccttccaaagtgctgggattacaggcgtgagccactgcgcctggtccattttatgcatttttaatgtgtattctcgtttttggaaaatgtgaacagaggactattaaactcttttagcatcagaatagcaaggaggtaaaaaaacaaacaacaaaacaaacaaaaaaaaccctctttgtaaaataggattgagtatcgttggattgagcacttaccaagcaactgtgccaggcatttgtgtccttcatttaattcttacaagcctgagtgttcggtattttaattttataggtgaacaaatagaagctgagggtgaaggacctacagctgtcaccttcatctcttctcaacactgccaactgtctccttggatctcccagacagacgactagggacatctctggtttctcggtgctccctagaaacctagggtcatttcaaggcattatgcaaatgagctttccttctcttcacctcatctcctgatctgcacaaaaatgaccgtaggacccactgtaggtaccaatgtaggcaccaatcctcagtttaccacctgctctctacttgcttccctgccataactttctaaaagggatgtgagccatgtttaaagtcacctggtcactggagggatcttgttctacactctacatcagtggttgccaacctttttggcaccagggactggtgttgtggaagacaatttttccacggactgggggatggggggagtggtttcaggataaaactgctccacctcaaatcatcaggcattagattctcataaggagcacacaacctagattgctagcaggcacagttcacaatagggttcgttctcctgtgagaatggcatgccgctgctgatctaacagaggcagagctcaggtggtaatgggagcaagggggagcggctctaaatacagcttgccgctcacctcctgctgtgcagcccagttcctaacaggccacagatggtactggtctgtagcccaggagtttgggaatcctgctctacagagtttccaacctcagagatgaagcatcccctctgtaagtcagaaagaaattattcaagtaggagaattaaaacaggatcacagagagggaggctgaagaatttgtctttctgtgtttacttgtatgaggaaaaacggcacatggaggcatccacagtatttaatttgtttgtatactagttacagataaacaggtacaccccatatacaattaccaatactttttatacagttcatatttcggtacatcaacactattttatttacactctatttatgtacattaacatctttctaaagtcagtgcattgtcaacaagttttatacagtaatttacaaggtgaatgtagttaatagttaatttaataaattttctgctagttcatgaattaaaaaaattaattacaaccagtataacaaacacagatcaaacaacattagtagattgagctacctgcttaaataaaacatctgtaaagaaattatttaaaatcttccactttttaatgggaatggacagattttatatactgaaaatcttgaaactataaagtatgcattttgtctgactttattacattagacaatttaggccagtcctacctacttgcaattatattttttctgaaaaggatttcaatttaggtagccatttaagataacctttccaaatgctctgagaactagatattaatagttactggcctcagatatcagaacacaaatacttagttacattggtaattactatctatgaggaagaaagggtagtggaatctgacaattaatgagaatcaacttgcagggtctaaatgaataaacaaagaccaaaaataaggtgaaacatttccttcaagtatatattaaaaaactacacgaaaaaaatgctacctgaaataaataatatttatacttttgttccagtcttgattagagaaaaaaatgaagtaagcaaagaaacataactttcgatgactactgtaaaatttaaaaaaaagacaaatatcaaaataaaaaaattagtggacatgcaaacaaagcaaaactaaagttgacttcctaaaaccaccaatttcattaaatacacttatgaactcctaatgtctgggatgtgttttgtttgtaatttatagcccttagagccatcaaatacacacaagcaagttcatttgcatgtgttctctcttttttaaagtgcaagacaaacacagaaaagaacaaccactaattgtgaaacgtgatctagctccaatgccacttaccttcccagaagctcttgttgcaacaggtgcatgtgaagatggtgcaaatattggcaactgctccccttccctcagcatgggtggggccgggggtgcagaatacatttctgaggatacttgaagtatcctaaatgtaagatgcctccactgggagggccatggtagctggatttcccaggatgctgtttctttctactgggtctcccacaaggctctgggtggaaggcacacagctcttaagagagcctccctttcagactgaccactatatgcccctgccaccaatgactggttgtgtctcaaacataaatacaacggcaaaaacaaaaagcaagaaagacaaagaaagggtatggaaacagtttaaaaaataaattgaaaaatcctcgtccatgccttaagaatcatttgcacaccttcgtgatcttgctttctccatcttgtcaatataatggaataaaacttcaggaaaaaggaggtagcatatcatgtcgtccctagacaacattataattgtttgttttttactctgactccaaggaaatctttaatatttgttatgattatggtaaactctatactcactacatatttgttcatatctggacaagcacaattgaattcttatttggtcccaggtggctggtgccaaaccttttgtttacaggctaatggtgggatctgcctgaaagttctctatcggagagcttgtatgagacttcaaaataaaatgattactactcttaaagttaactattttaattagaatttttattttgtgcttcagggccacaggataaaataactacatttagcttgcctttcagtgacgcttttgccaaatgtcagctacaaggagtcatctccctcaccgccaagctgtctagcagccagagtggtagctttactgtaacacacagtactttttgtaatcagactcaaagtcttcatccatactgcttgtgtctgccatctttttgccatcagtctttggcagaaattgtgcatagtctatcccctgctgctcatagaaaagaatgtaggcagagtcggtgtcaatttcatccgggtgaagttcctgaaagggcaagaaaaacctttaacaaaaagccatcactactatggctctaaatccttgccaggaaagggaagaccaaccctctgtaattactaaacctgattgcttccaataagctcactagtttggctgtctcacacctgcccctttaagatgagccccattatttccaatgtttgctttggggaaaatattttgaccatagacaagtcaaaaaagaatgacctaaaacctcatcaaattctatttatttatttttttgagatggagtctcgctctgtcaccaggctggtgtgcactggtgcgatctcagctcactgcaacctctgcctcctgggttcaagcgattctgctgcctcagcctcccgagtagctgggactacaggtgcgtgccaccacgcctggctaattttttgtacttttagtaaaggcggggtttcaccatattagccaggatggtctcgatctcctgacctcatgatccgcctgccttggcctcccaaagtgctgggattacaggcgtgagccaccgtgttcggcccaaccccatcaaattctaacagtctagaagataggagtttttgcattaactaactcctgttttttttttttcttgagacagagtcttgctctgttgcccaggctggagtgcagtggcgcagtcttggctcactgcaacctccacctcccaggtttaagccattctcctgcctcagcctcccgagtagctgggattagaggcacgcgccaacacgcccaactaatttttgtatttttagtagagatggggtttcaccatgttggccagtctggtcttgaactcctgacatcaagtgatccacctcctaagcctgcctcagcctcccaaggtgctgggattacaggcatgagccactgcacccagtcaactaactctttatttttcctcactactcatgttttcattccctactctgcatataacttttgttcctttaatactgacagcatctatatattgattctaacagaaatatctatttcctattcaagagatagtccattatttcaacaaatgttccccagttctgttgatattctgtttctaactttcattcaaagactgagaatgtttaccttacagctgctgtcattgtaacagtaccacttgcagtttgggtttttggcataagtgacgtaatggcccccacccagaattcctgaatggcactgtaagagataagagagtggaggtatgttagcagttaactgtactatggccagggtatagcactaggatctgagcaggagaacactgatcatgtaaatgatcagtaggtgaaaaaatattttagaaccctctaactttttctaaaaccaaaataagcaaaaagcaaaatacaaaagtcataagctctaagtcttgtgtggataaacaatcattttataattgtaattactattattattattattattattattattattttgagacagggacttgctctatcacccaggctggggtgcagtcgagtgatcacaactctctaaagacttgacctcctgggctcaggtgatccttctgcctcagccttccaagtagctgggaccacaggcacatgccaccataccttgctccattttaaaattatttctagagatggggccaggctggtctcaaactcctgggctcaagtgatcctcctgcctcagccttctaaagtgctgggattgattacaggtgtgagtcaccacacctgggcaggccaagatttctgtgttaactttgtctatcactaagctcaatgctaggaaataagcaggacctgaaaaaaatacttgctgatgaatacatgaagacaagtgaacaaaacacagaccactctctgaaaaccatataataaaccacttaccgaaattgcatatagattataaataggcttaatacgagtatcttctctttggtcatcagtgctgtcttcttcactgtggtttccaagctgaccattgctgtagccattgccacatgcttcatgctcataaaggaatccattggccaaagctacctcatggtcctgaggagtgaccaactctggttggctgccccccagcacatgccctcgactcaaggcgtcagccagctcacatatctgcccagccccattttctttgctggcatccaagttctctttactacttgacagtttatttttgctgccaatctggggcagccggagcctccctttgctcctccccaaagtccgtgggctgctattagggctgctgtttttgctggagggacagctggttccactttttcttgatgaagaaggagaacctgtgaacaggacagaagaaaagattcacaaattcaaatgccacaaagtaagccagccccaaatgctacctctgaggttagcttcacaactgtacacacaaaggtaaagacagggcagtcgtgactggctactctttagttcctattatgtagccagtaagttacatttttgtcttcttcaatgccaagtccctataagcaacaatgtcctcaaaatgtaaagtacattatagggactcagaaaatagcagaaagatgatttatgtcagattcagttgaaaaaaatctaactattagagtaaggagttttccaaatacatattcctctcctttgtaaaattagacaaaaaatgtgaccaccatttactgagtacttcctattgttaggcatggtactgggaatttgttgctgtccattgttacctctatgtctcacaaaaatcctgtaaggctttaaactttttggttatagcctcttacccatagccccttttatacctttaaaaattattgagaacctttagaacttttatgtgaattttatctatcaatatttcccgtattagaaattaaaactaaggaatgaaaaagtacaatacattagcacagacttcactgtcaaagtgacgatattattccatgtcatgttatctctcacaccattgtacatttgtgagagaataaaagtgaaaaggcacatattgtcttagtatttttatgaaaatagttttgggcaaggcacagtggctcacacctgtaatcccagcactttaagaggctgaagcaggaggttcacttgggcacaggagttcgagcccagcctgggaaatatggcaaagcaccatctctacaaaaaatacaaaaattagccaggtgcagtggtgcatgcctgtagtcccagctactcaggaggctgaggtgggaggattgattgaccccaggaggtagaggctgcagtgagctgtgatctgtgttgcaccactgcactccagcctgggtgacagagtgagaccctgtctcaaaaaaataaaaaataaaataaattaaaaaaaaaagagttttgatcctctagaccccctgaaagatggggaacctcagaacttttgctataaggggacaagacagcagctaccattcctgtttaccgtatatcaggcactgtgtgaagtgctttactctccatgtgtcactctcaactctgtaaacctggcattatctccattttacagatgagaaaatagattcagggaggctgaacctcttgctaaaacttacatagctcaaatacagataggtctgattccagataggttctttccacccaaccaacctgatgttccagaacagaagacagagaaacatatgtagcctacaggagtcccaagaaagcacctgcataaggcccccaggcctcacctttcgggctgctgatgatgttagcgctgagtgaggatgggcttttgctcaggagcacgtcctcttccccagccgaactctgcgcatccactttcttcacctcccttgccagaatcctgggctcagagagctcatccccctggggtgtgagtggtttatgctggcagagagccgggtctcttggtaccaaaaaagcacttggatcaaaactttcccgaggaaatttgacaattttctgtgattttatccaccgaccatttacaaattgaaatcgcttaaggtgaataatctggagaagtaaaggtagaaaacatctgcattaaagggttctgaagatacaaaatttacatggaaaaaacaagtcaaatacatgtgaatgtttgggaatatataacagaacatttactcttcattattttttaaagacttcaaaaatatggtttcataaaggcctctacataggccccagtgcactggtgtgcttgtgcacacacactcaactcagcagtgtggcacagccacgtgactgcgcagtgggtactgcctccaggctcagttgctcttctagagtccacaaaggcttagcctaagcttccaccctccacagagccagaagttcaccctctcctgaagttcaaattcaccacattgtaccccttgtggcagttctcacatcacactgaattgcagttactggtctacatgactgctctgcttgttttatgtgatgattatatgaaaatatatacttgtcaaaattcatcaaactggatattaaaaatctatgcttttaattgtatgctaattatacctcaattttttttaaaaggtctacccgtcagccgggcgcagtggctcacgcctataaaccccgcgctttgggaggccaaggcgggtggctcatgaggtcaggagatcgagaccatcctggctaacacagtgaaacctcatctctactaaaaataaataaataaataaataaataaaaaacacacaaaaaattagccaggcgtggtggtgggcgcctgtagtcctagctactcaggaggctgaggcaggagaatggcatgaacccaggaggtgaggcttgcagtgaactgagatggtgccactgcactccagcctgggcgacagagtgagactccgtctcaaaaaaaaaaaaaaaaagtctccccctcctccccacccaccttgtctccaagcctgccccttccctctagttcctatctgtggagctagctaacaaccaatgttattaatttcttgtgcatcattccctgggaagctgttctggtctaagaaaaacctacattcagcttcacagagtagtatgacagagacatgaatagaataagaaaacatggctgggcacggtggctcacgcctgtaattccagcactttgggaggccaaggtgggcagatcacctgaggtcaggaattcaagactagcctggccaacatggtgaaaccccatatctactaaaagtacaaaaattagccgggtggtagtggtgcatgcctgtaatctcagctactcaggagactgaggcaagagaatcacttgagcccgagaggtggaggttgcggtgagctgagattacaccactgcactacagcctgggtgacacagtgagaccctgtctcaaaaaaaaaaaaaaaaaaaacatataaatatctgaattaaaatatgccagtaccttacagttacactgatcttaatgaataggaagatttgtcacttcaaattctcctgacaaacaacaggacagtctcctaatccatgaagggagaaggcagaagtaaattaaatctaaaagaacacacaggccctagtgcactggtgtgcttgtgtacacacactcaactcagtagtgtgccatagccacatgattatgtgcagtgggtgttgggggctccaggctcagttgctcttctagagtccacaaagggttagcctaagcttcctctctccacagagccagaagtttaacctctcttgaagttcaaattcaccacgttgtaccccttgtggcagttctcacattgcactgaattgcagttactggtctacatgattgatcttctaggttataagctctttaggaaaaagaactacaaaatatttgtagaaagattcatctctgtattcaacataaaaagcttgtacagaaagtgttttaaacactgctgcaggaaaggtcttattctcaaaaataacaaaacctcctgtttgttcatgtcttctttcttttatgccagattcctgctctctcagaggcaggactgtaacataccaggatgggtggaagcctccagagatccagcttctttgttgctaagcagtgggtcttacacttggaacagtagtacatctcattttcccctagctcttcctcactggtgaaagcacggagacagctgtccaggttgatgggctcggcttgcgctcgccgactctgctccacactctcatgctcatctacaacctgcaggtagagggaacaggaggaaaggggtgcgtgggaaggcatttaaagtggtgatctaggtatgcatcaacctcttggtcactcacccttattttactctatataaggaaaaagaaaatacaactggctgggtatggtggctcatgcctgtaatcccagcactttaggaggccgaggtggggtaattgcttgagtccaggagttcgaaaccagcctggtcaaaagagtgagaccctgtctctgtaaaagaaaaatctaaaaattagctgggcattgtggtacatgtctgtagtcccagctactcaggaggattgcttgagcctgggaggtagaggttgcagtgaactgtgattacaccactgcgctccagcctggatgacagagagagaccctgtctcaaaaaaaagggaaaagaaaacacaacccaaactagagtctgagcaaatacagcacctatatatttattcacaaatgttacatcggtaacattctggataaaatttctatttatatgaccatagcttttcttgaaaaatttttgaacgcttcaaaatgacaaaaacaaaaagaattgcatttatttaacaactttggaatcctataagggattacatgtgagctggccctcaagccaggggtgctgatagtaagccatttacttttaatcagaaagccagagcattattagtatgctgcagactttacagaggctaggagaaataacatgaaacacagaaaccagagctggatgaaataagggcacagaaaagctcaccatgagaagacaacacagcagagcatgaaaccccacagggtacaactcatttgcatctgattccatgtaacacagagttatcagaataccaagtctataattatctgtctcctccctcatggggcctttttatctgagatggcaacaaaaggaagagcaagctcaaaagagtgtgctgcttttgctgagaaggcccctaatactcacccaaacctttggggtcctgttaatcagcatgttaggctgtggagcaaggaggaattaagtataagaaaggacagagagcaaagaatgggcggggtgcagggatgtaagttgggggtggtgtagaatgaagaagacggagagaaggaaggatctagagtgcaacagaaaagaaacaattttttcctctccatgcctggctgctacctgacaaacaatcaagaatcatagagccgggatccttctgtttgtccctctaatgtatgggaaggtgggtgaagcatcagggttatgaatgctatcatgagacttcacacagtatatatttgtgtcccaaagcagagcccagaccacaaggcccacactgactgcctctctgtggcaaacgtcacatatgtccatcacccaccctatttattgctcctcccttccagaggtgaacttcctccatgaatttcccttcctgaaactcatgatgggaacattaggctgttgcaatacaaattggcacagctcaagacattcagtttagaatgggttttcaggtgagacttcttccctatatgagagtcacgaggctctcaaatgctgctataaactagcaaggctggatttgatcgtgcaattaaggttctagcactgcataactatccaggctaaagagctcatttaaaaaggggaacttagaggaaaattctttttttagaaaaggaaatctggcttggacttgggttatagacttcttttttgagtacaaattctgtagtaacaagatattaactgtcatcatcttttgaactggtcactcaaggaaaaaactgatgtgcttcaaaaggaaacgtgctgcatcatcgttgttggaatgagtagaaaaaggggtgtatcatatacggtagtgtttcctttctcatagccagttaaatattatctctattatctctaccaggaatactttatggccaaccacaaattagagtaagctagtaaagaatgttgatttttattgactatattttctgtggaacacaggctacagtgctagatgaagacaggaaagaaggctgataaaaaacatatttgtggactgtactgacaataatttctatttatcagtaaatttcccaaagtgataaagattccctttacctcttgggatctacgcttagatcctctactattgtttaaataatctataaattacttataggcaccctcttctttttcaaagttactttaaagctcatctttaacacaaaacacaggaaatgaagtaatagttttcatagaagactattgaaaaaaagagagtggcctaagaatttgtctagcttaattttctttttttctttctttttttgtttttttgagacaggttcttgctctgttacccaggctggagtgcactggcgagatcacagctcactgcagccttgatctcttgggttcaagcagccctccaacctcagcctcccaagtagctgggactacaggtgcacaccaccacacctggctaatctgtgcattttttgtaaagacagggtgacatcatattgcccaggctggcatccagtttaattttctactgaggaatctgaggtcccaacaggagagaaatgtaaaggataagagtgattgcctctgttttttttctgattactaggtataatattcatgttggaaagcagagaaaaatgttaaaaggcagggaatccttttatattcttaattatattcttaatacaaaggcaaccactgtcaaaatattggcagattttcttctgtcctctttcctaaatagtatttttttcaatattgaaggtattatttccagtatatgcaactttatgtcttgttttttaaaaaatgttcacatatcataagcttgttcccataaatgttagcaaaaactcctggtaatcattttcaacaaccgcattatattttatccaatgaatacaccatgctttatttaaccattcctctaatgtgagacaaatataagttgttaataactttttgctattctaaaaaatgctatgatgatatttgcctgcaaattatggagtaattacagagtattctcccctcagataaattcctaaaagggaaatcactggaataaaaaatataaagtatatgggcaataatcccaatttaaaccacggtatctcttttgtctacatgactttctaagcacattcagaaaccctacatgtaggggagcccagattagtcatatgggcccactccctagcaaggcatcaatagcccttcacttccatggtatcctaagtgcatcactgaaagtggaagtagggtgagatttaacaggtcacgtaggccgtttcctataagcaggatgtcctaaagagcttttccgattgcacactggatttgttaaaaaggggaagagatttatagagccaaataatttgtcatcattgacagtaatgtcttgtcagattttgtgctgacaaagatttatgaatctatcaactagtaaaattttccctccttgctagtgagcatgatctagaacattagtttctcttcagctttctttagctttagcctagtgatctttcatttgacaagtatccacaaattatacttatttctggctagaaagggctcccaggagccttggtgtgtgcggcatattttgggatctaaataagaaactaggtctagaattggtagtttccccagtcctccatagcacaacaagacagaaaagtcagttaccgttactaacttatccaaagggaatgctttaaaaaatagtaaaggaaatttccaactatcaagagccataaaaatgcaaaaaccactacaattcctcatgtgacttaaggaactcctttgactctgttgtttttacctctctatcagattcttaatgtctttaccattcaaataatatttggttgattaaaaactgcctgaggcaaacatttttaggtatggagttaaaattatttctgaagcaacattttcaaaatttaaaaattgctctggccagacagtgacaatagaagaatgtgaagtgcaaagagtggccactgagatgtgctcttaggtacccaaaatggaaacatttcaatcctttctgtaacttttctgatcactctgcctattaaaggcagcagctatagccctgggacacatttgaactaagtaactgtggttaccaaatgctgcaacttcaataatatttaacagagagatgcttattgatatgtcatggccagacacagttttgtttcaaggttcacttattaatatttttgaaatttaatgcctgctatagtttggacatggtttatttgtctccatcaaaatgcatgttgaaatctgattcccaatgtggcgttgttaggaggtggggcctagcaggaggtgtttgggtcataggggtgaaactcttgtaaatggttggtgccattcttgcagtagttgagttctccttctgagaacttagtttccaagagagcgggctgttagaaagcgaggatcttcctcctgtttggtcctccctcttgcctgtgtctgttctcctttgatcttctctgccatgttatgatgcagcacagaagcctttgccagaagccaggaccatgtccttgaacttcccaggctgccgaacagtaagctaaataaacctcttttctttacaagttaccagcctcacgtactctgttatagcaacacaaaatggacaaagacaatgccccaatacaatgaactccagaagttggaaaatgaaaaagctcaagcaaacatgtcaatatattaggtgccatagaggatgccaatgaaggtttttctggttgtttttaaattgtctaaaacagaaatggcataatagttacactggtggaaatttctcatataaaaaccaccattttatggtggccctaaatacttaccctttcctgggatgtttgatagcgaaggtgaagggctgtgggatcccaatccacagcgatataggcatttccaatgaaagctctgtcttccccacaatcaattttacagcctctgcaaaatctaaaaagggggaaaagatccacagaggaagaaataattatgaaggaatctaaattttcttaataaaaaatattctcccttcctacttttctgctttcctcttgggcctcacaatttgtcatgggcttctaacttcagactctgataaatgtagggatacttattaataattagtacagtttcagggaatcatgcttttcatttttcaagtctttatttttacaaagtacttgataaccacctgttaatcacaggaagatgtgaactttatggcaaataaatgacatgggaattgcctgtttgagatactacagcactcaagaaattccaaattcagttattgaatgctctgaggtaggacaatttatctggtgtaacacctagctccttgtctgtaaaatggcagattaaataaatgcatataaaagtttacaggggccgggcatggtggctcatgcctgtaatcccagcactttgggaggccgaggtgggtggatcacctgaggtcaggaggtcgagaccagtctgaccaacatggtgaaaccctgtctctactaaaactacaaaaattagccaggcatggtggcaggcacctataatcccagctacttgggaggctgaggtgggagaattgcttgaacctgggaggtggaggttgcagtgagccgaggttgcaccactgcactgcagcctgggtgacagagtgagactctgtttaaaaaaaaaaaaaaaaaaaaaaaaaagtttatagagttgcagaggtggggtgggagatggggtaggggggaggatataataaagtcatggttccaatgcctactttattattattattatttttcttgagatggagccttgctctgtcgcccaggctggagtgcagtggtgcgatctgagctcactgcaagctccgcctcccgggttcaagcaattctccagcctcagccttccaagtagctgggactacaggtgcccgccaccatgcctggctaattttttgtatttttagtagagatggggtttcaccgtgttagctaggatggtctcaatctcctgacctcttgatctgcccgcctccacctcccaaagtgctgggattacacgcgtgagccaccacgcctggccaatgcctactttagactcagtttgctaagtctattgcagttctctaaaggcggactttagtatcattaggcactttccctgttgtaacagcaatgaccaatcaatctccgtaactctttaaaaaccaagaacagatttccagcaaggtctagtaaagactatggtctactgtgcttagaactggcaaacttatatttaacgagaggcttggcgtggtggctcacacctataatcccagcactttgggaggctgaggtgggtggatcacctgaggtcaggagtttgagaccagcctaacatggcaaaaccccatttctactaaaaatacaaaaattagctgggtacagtggtgtgcacctgtagtcccggctactcgggaggctgaggcaggagaattgcttgaacctgggaggcagaggttgcagtgagctgagattgagccactgcaccccagcctgggtgacagagcgagactccatctcaaaacaaaacaaaacaacacaaaaaaggagaggtgaagttatagagtaataaatgtttatcacaagctatgaatttggtatggactgtagtttataaaaccagctaaatctcaaaagcaaaacttatctattgacctcaaaaggaagtgaaaaatattttttgagacggagtttcgctcttgttgcccggctggagtgcagtggcatgaccttggctcactggaaccgctgcctcctgggttcaagcgattctcctgcctcagtctcccaagtagctgggattacaggcacgcatcaccacgccccgctaatttttgtatgtttagtagagacgaggttttactaggttaggctggtctcctgatctcaggtgatccacccacctcggcttcccaaagtgatgggaatacaggcgtgagccaccgtgcccagccacaattcttaagtttctcattattcactatttacttctcaaaactggaaatcttatgaaaactgtataatatctaaagctgaaattctactaaagtaattcttttgcaggtcactttacctataccatgggcaccaagcacaggagttcccatctttctgcacaactcgtagagtgaatggatattgatagcccatactgtcgtcactgaaacagaagagaacaaaaagagtgtaagaagcatttctggttcgaggtccaactcctcttcatcttctcttgaagtaaccctaggaaggggcatttgccatagcagtacgctcatgttgacagctcaatgttacttaccctaatccattagctgcagcccagtaccaaatacactctggcttcccatcctctatctgggcttacagaagggtagacataagactgccagatgtctctaagggagtccatgtggcccatgaaaattttataagataagctaatcatgaaatcaaatactaattatccttcagccttaattctatcagaggatttaattcacattaaactaaaataattagatctttccatgacaagaacaccgacacattgcagaaagctgtatatttagaagtcttctttaatcagaatcgctgatgtggtacatgctaagtactgccttaactactcagagttataagctacataccatttttggagtaactgcttttaactgccaatgattatgtcaagatggccctgtgaattttccaacttttaaaaaaatttactcatccttgccctaacaaggagcaatgcaacaatttatacatattatcaaaacataagctgtacaccttagatgtatatacaattccttgaacctgggaggcagaggttgcagtgagctgagttcaataaagctgggggtgggggagaaggaagcaatgcgaggaatataacataagagtggcatactttacagctcatctggcaactgacagtggttattacatgggctattgaaggtaatgaaaccatgataaagagtcactgtaagggcaaaggtgagaatcacatctggcataggagttcccatctttctgcataactcgtccagtgaatgatcattgatagcctgtactgtctagtaccatgtccaaatcaggccagcaataagtgaggaatcaaaagaaagataacgggataaaacagtcaagtagcactcatagaaagctgtgcagcacttcccttctgaaaatttcttttacctttttgctctaactgaatgaagcctggctttcttgagaatcctgctccccctgcagactttttccatttttttttttgagacagggtatcactctgttgcccaggctggagtgcagtggcgcaattatggctcacagcagcctccacctttctgggctcaggtgatcctcccacatcagcctcccaagtagctaggattacaggcacgcaacaccatacctggctaatttttacattttttgtaaagacagtatttcaccatgttgtccagcctggtcttaaactcctgggctcaagtgatcctcctgcctcagcctcctaaagtgctgggattacaggcgtgagtcaccgcaccctaccccctgcactttgtattctcatacgttccagaacctggaggtaaaatagatctcttccttactcctatgccacttgtgcatgatttcttcttccttccttttctaaaacattccagcttctttgtagcatgtgctactgaattatgctacctgctattcctccttggaaggtacatatcttctttactcactaaagattgcagcacccagttcactgtgttttttctccaccatttctcctgttattattcttggtgacatcaacatcaatgcaattaatataacagtaacttggtcttctcttttccaacaataagttcctccaccccatatgtaaaccctctccaaatgtcatattctagaccttgtgaatacaaacttttctacctccaaaatctcaattccaagtatcctactttgcaaccaccacctcctatctttttgggttacttacttattcgaacatccctattctaatgattctttcacccaagagaaacctccaatcactgccctgaaatcctcacttgcctctttacccactgtccctgaaaataatcactcttctccatagacccttaattccaggattttgtccatttaatctaaaatttcaaatttattgacataaacactcaagaagtcgagaactatacaatgaacatcccatgtattcattacccaactataaaagtcatcaactccaggccactcttatttcatccataactttaccaagtaccactagaatcaggtgagagctaccatgcctggctatcttttttaatgtccgaaggacataacccactccaatctctactcccttatctatactaaaatagctttcacaaagatcaccaaagaccattttatcaaatccagcgggcaattcccagtcctctgtagcatttgaaacgactatcactcctttcctgaaatacttccttcacttaactcctggttttcttcttacactatgggctgctccttctcaatcttactctctctcttttgagacagagtcttgctctgtcgcccaggctggagtacagtggtgtgatctcagctcactgcaacttccacctacagggttgaagcaattctcaggcctcagccacccaagtagctgggattacaggcacgtaccaccatgcccggctaatttttgcatttttagtagagacggggttttgccatgttgggcaggttggtcttgaactcctggcctcaagtgattctcccaccttggcctcccgaagtgctgggattacaggcatgagccactgcacccagcctcaatctcttttgatgcttctttttcccttttcaatctctaaatgtcggaatgcgtatgaactcagttcagagttcatgtatagatgatgggaatcttctctatttaactctcactctctaaatgttaatcatctggtctcagggctttaaatacacctttttgttgatgacatctgtatctccagcagaggacattcaagtgaatttcccacttgaatatatcatagacttcttgaatttaacttgattcctgtcttttcttgccaaaatctgctccttctccagttttccttcttccattaaatggtaccaccattcacaaacaattgttcagggtaaaaagccggcctgggccgggtgcagcagctcacgcctgtaatcccaccactttgggaggctgaggtgggatcatgaggttaggagatcgagaccatcctggccaacatggtgaaaccctgtctctactaaaaatacaaaaattagccgagtgtggtggcatgcacctgtactcccagctacttgggaggctgaggcagaagaattgcttgaacctgggaggcagaggtgcagtgagccgagatcatgccactgcactccagcctggtgacagagcaagattctatccccacgccaaaaaaagaaaaaaaaaaaagaagtcagcctggattcctctttccctatactccacatccaattcattagcaagtcctgggaaaagccctcgtctagaagctctttaattcaattacttcacttcaaatttaatcttgtccaactttcatctttactaaacacaacattcattaactaaactgcttatctattatttgcagttttcctttaggatttatttaaatcttaaaataaatactttaaacaattatttatttaaataacttattttggccgggcacgatggctcatgcctgtaatcccagcactttgggagcctgaggcaggcagatcacttgaggtcaggagtttgagaccagcctggccgacatggtgaaaccctgtctgtactaaaaatacaaaaattagccaggcatggtggcgggcacctgtaatcccagctactcaggaggctgaggcaggagaatcgcttgaacccaggaggtggaggttgcgttgagccgagattgcaccactgcactccagcctgggtgacagagcgagactctgtgtcaaaaaaatacaaaataaaaataaataaataacttatttaagtaaagatttatttaaatctttaaatttaaatctggccaggtgtggtggctcacacctgtaataccagtactttgagaggccgaggtaggtggattacttgaggccaggagttcgagaccagcctggccaacatggtgaaaccctgtctctactaaaaatacaaaaattagctgggtgtggttacgagcatctgtaatcccagctactcaggtgtctgaggcatgagaatcacttgaacctggaggtggagtttgcagtgaacaaaaatcacaccactgtactccagcctgggtgacaaattaagaatctgtctcaaaaaaaaaaaagatgtatttatcctaagccctaccctaatcatcaaaataccccatatcataacaaataagtaaagaactttttttagttaccataaaacagaactctcatttgtaccatgatggcaagaaaatgatctacaggccgggtgtggtggctcacgcctgtaatcccagcactttgggaggctgaggcaggtggatcacctgaggttggaagtttgagaacagcctgaccaacatgaagaaaccccatctctaccaaaaaagcaaaattagccaggcatggtggtgcatgcctgtaatcccagctactggggaggctgaggcaggagatttttttgaacccaggaggtggaggctgcagtaagccaggatcgtgccattgcactccaatccgggcaacaagagcaaaactctgctgtaaagggaaaaaaagaaaagaaaagaaaaatgatctacaatttgattgagataaaaataagacatcatcaaaatcccaaaaattattcagagtaaatgcatttactaatcaaatagaacagtgataggaaaaagggaaagaaaacagaaaatgttaattatttttatctagatttatgaaattacttcacgttaaaatgacatggtaagggaaaaagaaaaaagaatgacatggtatggaaataatccaacagaattattttttgtatcatgagacttttcagagttcacgtatgcagtcactctcattctgaatttcagaggactgagattatacaaatttcctggtgaattcatactctctacttttgcaacacagaagacaggatattacttgaagcattagcaggatgaatccaggtaaaagattagagaatggaaggattatttgacactagaatgtttggcaaaaggaagctgtatcatctctcctactccaaatatcaaaccaaatggttgaattgtatgctgtctgagtggttcttccaagagtgattaacttgacataggctgggtcctatcagtcatgtagaattcatatagattatttttctagagtttggaaaccacaggtttagatggatcccctgaactcaccaatcctgggcatgattactagcttcctgaggtgggagtgggctcgctaaccgggatacttgaatccaaaccgcatcatataggtctttcttccgggtatgcacagtacatggaacaatcaatggcattccaaagaggctggggcgattcttctgagatgacaggaaatacagttctgtcctcatctgtatgtacaaacaagagaatagagagttcagaagacaggcctctgattcctccctttagttcttctaaatgcctgccaatgacaggcactatcaccatttcaaatcagtcactatcacattcttctctgtatttataaaaccatctttattgacacaaagagaacggttacagtggagtcattaaaggggctgaggtattgccagttttagagttgttgcctattctatcaaatttgggtttcagcaattaatatattcaaaccagttttctctgataaacatttctcacatacactgactcacatgtaaaaactagtaatagcttcatagctaagggcttttaaacaattaaggctctttctttctccagaaaatatgccagtaagctgggtgtggtggctcacgcctgtaatcccagcactttggaaggctgaggcaagaggatcccttgagcccaggagtttgagatcagaatgggcaatgtagggagaccctatctctataaagaaataaatacaattagctgggcatggtggcatgtgtctgtagtcccagctatacaggaggctgaggtgggaggattgcctgagtctggcaagttgagggtacagtgagctgtgatcgtgccactgcactccagcctggaaggtagagtgagacctgtctcaaaaaaaaaaagaaatgaaaagatgccagtggaaaaaaaaaaaaaagactctctcaactatagttttctagggataagctgttgatagtggttgttggagtggcaatttccaaagttttggagatttgtgaaacctagtaattctattttataacaagcttatccaccttcctaaaagcagttaagtgattttaatctttttttttgttttttaaatacaggataggataaaagtaaggtaaaatttttaaaatttgctttgagtacgttaaagagatatttacgatattccttaatatagagatactgcacagaattatcctggaaatggctgttaaataaacatttagtataatggaatggttggtgggagttcaaggttatctaaagctgctgaacctttgaacatttaattccctaagaagtttggtatttattgagtagttagaaaagctaaatcaacaacttatcaactcactaggggttaagttagctagtttctaagtaaaaagaccctttattcagattattaagcattttattttgccattttcatttaagcttaaatacataattttaagcctctatttcatatgttactattattataagatccagagaaatccagacagagttcagtacaaatattttataaaattttaaaacgtagctaaacccacacaattttcatcctctcattaaggaacttctcctagtgccctagggcccatactttctcagttactactgagataaattctactcctagttattaacatggttagaaacttcaagccagggccaggtgcagtggctcatgcctgtaatcccagcacttcaggaggccgaggcgggcggatcatgaggtcaggagttcgagaccagcctggccaatatggtgaaaccctgtctctactaaaaacacaaaaattatctgggcatggtggcaggcacctgtagtcccagctactcgggaggctgaggcaggagaatcacttgaacgcaggaggcatagagtacagtgagccgagatcgtgccattgcactccagcctggccgacaacagcaagactctgtctcaaccaaaaaaaaaagaaagaaattttaagccaagggctactaatgcagagaaaaataaaaatcagaggtaaaagggtacatttctggctggatgtggtggctcacacctgtaattccagcactttgggaggccaaggtgggtggatcacctgaggtcgggagttcgagacagcctgaccaacatagagaaactctgtctctactaaaaatacaaaattagccaggcgtggtgccgcatgcctgtaatcccagctactcaggaggctgaggcaggagaatcacttgaacacaggaggcggaggttgcagtgagttgagggcctgccactgcactccagcctgggcaacaagagtgaaactccattgcaaaaaaaaaaaaaaagtacatttcaaataattatcacaaagcaactagctttccattatcactgagtttaagaaacagaatatagcgaacactcaaaagcctcccatttgcttcctccaaatcacaaattctcccttcctcacaaaggtaactattattctaaatgttacagtaatcactttcttgcttttctttacagttttatatcctatgcacaagtaaataaacactagatttcattttccctgttttaaaagtttttatatttataaatagaattacttaattcatttttgtttgtttgttttttgttttttgaaacagggtctagctctgtcatccaggctggagcgtagtggtgtgatctcagctcactgcaacctccaccttctgggcttgagagattctcttgcctcagcctcccaagtagctgggactacaggtgtgtggcacacgctggctaatttctgtattttctgtagagatggggtttcaccatgttgcccaggctggtcttaaactcctgggctcaagcaatcggcccacctcagcctcccaaaatgctgagattacaggtgtgagccaccgtgcctagcctaattcttttgtgtttggcttctttccatcaacattaggtttacgagattcatttatactctatataactacaaatccattcattttcattcctgtataatgttccattatcttaatatatctcagcttcccaatcccttctacaactaatggacatgcaatgttttcattttggggctactatagataatggtgctacgaatattcttgtacatatctcctggtacacatatctcttgggtggatacctacaggtagaactgcttatctttaactagaaaattgtattccaaagtagttgtttatagtatttaatttataattaaaattatttataattaaatataaagttaatttatattctcatcagcatggtatgagagttcctgttgctctacttagcaaccctgtcagtctgtttaattttacctgttcaggtgagtgcactgatatcataatattgttttaatttacatttcactgattactagtgtcgttgatcattttttttttttttttgagacggagtctcgctctgttgcccaggctggaatgcaatggcatgatctcggcccattgcaacctctgcctctggggttcaagtgattctcctgcctcagcctcccgagtagctgggactacatgtgcccaccatcacgcccagttaatttttgtatttttagtagagatggagtttcaccatattggccaggctggtcttgaactcctgaccttgtgatccatccgtctcggcctctcaaagtgctgggattataggcgtgagccaccgcacccagccaagttatcaattttaatgaagtccaatttaatcttttcttttatatgagtagcgtcaggaatgtatttaccagtattatcttccaagggctgtttcattgttttgctttcaaatttagctctatagaacacctggaattgtggtgaaaggtaggtgccaagtttcatatggatatctaattgtcccagcaccacttgctgagaaaactatctttctctcaccactctgcaatgttatctttgttataaatcaggtgttcatacatttgtgaactggtttctgggctctctattctatcccaatggtctacttgtcttttcttgtaccaatatgacattattttaaatatcatatctttgtgaaataaatcttgatatctggatgatatccaatcttgatgatatcctcatatcttactcttcttcaagagtatcttggttattcctggtgctttgtatttccacatatgagaatcagcttatcaaatcacacacacacacacacacacacacacacacacacgcagactttgcatttgtattgggattgtgcattaagtcatccgtagattagtttgtagagaactgatatcttaaaatattgagtcttctaatccatgaacatggtttactccttccaatatttcagtcttctttaatttctatcaatattttattttctatatagatgtcttatgtgtcatttttaaagtttattcctaggtacttaattttttctcagcatttaatttttttgatactaagataaataatatctgtagttgagttgaatggtggcctctaaaacagtatatccatatatccatgttctaacccctggaaccagtaaatgtgacctaatttggtaaaaggatgtttgtagatgtaattaagttgaggatgtcaagatgagatcatcctggattgtctgggtgggccctaaattcaataagtatccttatcagagaaagacagagagaaggagaaggctatatgaagaggcagggattgcagttatgcagtcacaagccaaagaatgcctggagccaccagaggttagaagagacaagaaagcattctctcctagaacctttggaggaagcccccaccctacagaaaccttagtttcagacttctggcctccagaaggtgaaagaataaatttctgggccgggtgcagtggctcatacctgtaaacccagcactttgggaggccgaggcaggcagatcacgaggtcagatcaagaccatcctggccaacatggtgaaaccccatctctactaaaaatacaaaaattagccaggcatggtggcgtgcacctgtagtatcagctacttgggaggctgaggcaggagaattgcttgaacccaggaggcggaggctgcagtgagtggagatcacgccactgcactccagcctgggcgacagagcgagactgtcaaaaaaaaaaaaaaaaaaaaaaaaagaatatatttctgttgtttaaagccaccaaatttgtggtaatttgttataacagtcctaagaaaccaatacagtaccttttttacaatttcgttttctcttgttgctgctatacaatcaatttacttgatctagaagccttgctttcctttattttatttatttatttatttaagacggagttttgctcttgtcgcccaggctggagtgcaatggcacgatctcggctcactgcaacctccgcctcccaggttcaagcgattctcctgcctcagcctcctgagtagctaggactaccggcgtgtgccaccatgcctggctgattgttgtatttttaatagagacggggtttcaccatcttggccaggctggtctcgaactcctgacctcacgatccacccgcttcggcctcccaaagtgctgggattacaggcatgagccactgtgcccggcctttcctttactttataaaattaagacactaaagtccaaagagctcaatcagctatctagtggcagaattagaactaaaacataggttgctaaattcctagttcagtgccctttctactctaccaagttgccactatacccgaagactacctctttaacaattatccactgaccagttttcaaaccttcctttttcttttttaccaaagagtcaacctttaatgcaatagttatatattagactgtcaagagaggaattacgcacaacttgattttcctcaagaacattcttgtatcctctaagaaaaaaaacaaaacaaaacaaaaaaaccaaccccaaaacaaaaaacttttccgaagccatccgcatttacgtggcagtgaagatatacatacctacacaaacacacaggaaacataaattttgtgtgtgttggtttttgtttttttctaatttttttagagacaaggtctcacttattgcccaggttggagtggagtggttatttacaggtgtgagcatcatagcatattatagcttcaaaatcctgtcctaaagggatcctcctaaacatgcctggcttaggagatacttttttttttttttttttttgagacaaagtctcactttatcacccaggctggagtgctgtggcgcaatcttcgctcactgcaacctctgcctcctgggttcaagcaattctcctgcctcagcatctcgagtagctgaagctacaggcgcatgccaccatgcccagctaatttttttatttttagtagagatggggtttcaccacattggccaggctgttctcaaactcctgacttcaggtgatccccctgcttcagcctcccaaagtgctgggagtatagatgtgagccaccgcacctggccattttctttctttctttcttttctttttcagacagggtcttgcccagcctggaatgtgtggggcaagcaagcatggctcactgcagctttgacctcctagtctcaagtgatcctcctgcctcagcctccagagtagttgagactataggcacacaccatcatggctgcttagttaaaaaaaagaagtcttttttttttttttttagaagagacgaggtctcactatgttgcccaggctagccttgaactcctgagctaaggtgatcctcctgcttcagcctcccaaagtgttgggattacaggtgtgagccactgcacccggccaggagacacaaatttctaaagaaagtagtactcagatgcactgactatcctgttgcctcttaatatacggataaggaatgtcatttcatacattagccaccatgagtaatactaaatcctggctctgatcacttatattagcatatataatacattgaaaatgcattcacagcaacagattttgaggacaggataaaaaagtaaaaaaataaaatttgtaaaattattaaattttaaaaaattaaagaaaagaagagaagaaaatacattcaatgatgttgcaaagacagaaaatgactatttcacaaatgacactagcaagactggcagtgagttgcctaacatttaactaaccatttttcggtggactgcaatgatgtaacctgtaaaggggctgtcaggaagagatggcatgtgaccattaaccattccatttgtgaagttcttctcagttccacatggcacaacagtgtttggcattccattggggatgaatattggtcggggtaggtccccattggtagttagggtgaacatttcatttgtagatggcgaagaggagaaatctacaaattcaaagataagtacagtatcataagcttgtggtattttcatctttgctcttttctcaagtatcctgaggaccagagacagtgtagtctcttaacacagggcagggagaaatcacagtataaataattctagatttattggaagattttaattttccagttttacttccctaactcacacttttggccaaatgaaaaggaaagagtaactgctggaaactattaagcagaatttttgcagaaacctgtatcagcaccatgttgtagcacacaaacagttctaccacttgttttcttttccttctctttgcctttgaagacactgtccaatacagtaacctctacccagatgttgcatttaaaatttaaattaggctggatgaggcagctcacatttgtaatcctagcactttgggaggctgaggtagcagatcccttgaacccaggagctagtgaccagcctaggcaacatggtgaaaacccatctctacaaaagatacaccatagctgggcatggtggtacacgtttgtagtcccagctacttgggaagctgaggtgggaggattgcttcagcccataaggcagagtctgcagtgagccaagatgatgccactgcactccaggctgggtgacagagtgagaccatttctcaaaataaataaattaaattaaataaaaattaaaaatgcattattctcactcacactaaccacatctcaagcgcttaacagtccacgtgactggtggatactgtattggatggcaaagatcacagaagtttccaccactgcagaattctattggacagtgatgctctaaactaaaactaaaattagaacatccaccaactcaccgtcaggactatctacctactacacatcaatgaggggagcctcataaagccctttatagttggggaattagcctaattaacctaattgtaagtaatataaagaatagacaaagcatactagtggctaaaaggactcagtgagtgaccacattaaattacatataatattggatttctttctagctatatctattgtttatattttctggtagtatgttcctctcatactagctgttgccatgttatattagatacaagttcaaagagatctgaattccaagggtatattagctaacgactacctatctaactgaagtcacttgggttctctaaattttaggtttctcgtcgaaaaaatatggaataatcagtaaggtttcccttgggttccaaaattcttctgctataatatcctcagcatgaacaaatataaaaaagatgacaactcttagacaaatatttaaaggagcaatcatgagaaggagttctagttctatcttacctgtctgtgttggactagaagctgaaattggagacacagggacaggaatttcaaatgcacacaaaaatccactcactgagagtcgtactttttggttgtcctgaggaaagttctacagaaacagaagcaagatgagaagggggagatgtttcagataaaatggaaaagttctctctctaacatatttcaaaagaatgtcttaggcgctttcatccgtaaaaccaacgagatgattgaataatttttcaactacataaaggatgaatgcttgataaaaataacggaaaactaacctcaattttcgaactattatctcttttcacaggaagaagtgtgttatatacgactgacttcagttttgtccgtttcagggatctaaattccaaccctcagagactccatttttgcatttcatattaagaaactgtcagtgaggtgagagtgtgttcagaaatcccaaagatgaatataaataataccagttgcaggagcttaatttagagtaggcaatatatttattagattatttgtttccccagctggtatgtagaaagacatgattggtgtcaatttgtctttactcttaatttcttagtgtgttaaaagaccaagtatatatattcataaatactaaaaacacacattcataaatacataaaatactttaacctaggaagaattctagtaacagcggtaatacagaagagttgtcaagggtaatagcagcagtctttggtaacagcagcagtctttggtggaaacctatactatagtgacacagctagaacactccatataggcagccttacgtatttcccttcttcaaaaataccaccatcagtattatccctttattctggtagaaaactcttaagtttctgggttggaaaacttggcattttttgttgttgttgttcagttttcgttatgttttagtatctctcttggtcacataacctaacaattgatcataataattgagaaaaatgtcatctttggaggatagaatcaaaagtttcttagagtagttaatattacctttatgttggaaccatgtacttctgctagaaggatttgttctgaattaagtccacagagatcactcagctgtttttttaaacctgtgtacttttcatccatattcagtcttagtccataccgtacaggggtagtaccatctaacttaatcactagtaaagagaaaagatcttttattggtaaaatgcaggtttcattgaaagtcttaaatgctgtgtacagatatatctgacctgtaaatataatagcaaatatttcagcctagaatttttattttatgtgtaaacactaaaacagatggtacttagggataatattaagtgaaatcagtatttttttggtgttcatctgacataaaagtatcagtggctttgcagggttttaaagagagttgctggcatatttgaaaccaaaaaaacatgccccagtctacatctttcaaacctcaagtcatgcctaaaattaggttgctcaattataatatgctgactaccggtctttatttgtaaacaaataactatgcttacaaattcaggctatttaaataaagtaaatttaatggagtcaagtaatttttcagaactttctgacctacctgttatttctaagtgcatataactgtccattggtagtggcaaagacaaaaaattgaaagggtcaaatcggacacttatatgcccacatgtcttgcattttacttgagatcttagctgcccatggaacaaatccacaacaattgatctatttcttcttagatggttgtcccaggcctagcaataaaaaagatgagaattttctctcaaaatccaaaagagaagcatttctatataaattcaaagaagctagttaaatatattggatttaaatgtaaagaatataatccttactcttcatttaacataaaatattaaattgagatggaaaatcctatttttcatttgttcttatcaaggtaacaatggtaaatattaaagttatttgtccattaacaagtataaagcatgcctataggtcactgtatccattactttagcaattacggggactctttaaattccactggataattattcctacatccagtcccataaagtttacaatatgaaatggcaacagttttctattttcattaaacgtatttttgttttggcattattgcataagaattaagcacagaaatagaaattcattcatttttgcagtaaagttctgatctcagaatagttgagtttgcatttaagttgtgctacatgtatttgtggccagaacattttgtctattgcttacattagaaactcaaaactgacaaacctctgcagctacttcccagtctggtcgcccatcactgtccttcagttccacatatggcttttcatggactcgattaagatcttcatgaagaccatccaagagaaaagccagaagttcttgggagtcctgttgctgaaacccattaaacctgggagcatattttgctatggtccactataaatataagagaagtcacagtcattatttcctacccataaaatttggaatgaacatgtcctataatccaatcagagccattgtaagaaaataaatagtatagtacttagtctgcctctatttcaacaaatatattttggataatcatgaaatcttttgaatcttaatgtcaaatgaccccccccaaaaaaagagaagtattttggccaatactgtgcaatactgtgtcctcagttcagtattatgtaagcaaactgttcttcaggcacacagatgttatttaagacagaaacattaaaacagcgtttgctcacattgaaagacatcctgttctataacgttttacatttttatatgcatataaaatatgtatattttataggtacatagtatatacataacatatgcataaaataatgtgtatataataatacataacatgtataaaataatatgtgtatacattattttatataatataatgttgtcttcaacaattacattttctggtcttgttgcatcctaaattttattaactgcattatattatagaattattttgaggatataaattaattagaatagtgcctggcaagaggtaagtagtcaaatgtgtagctgttatagttaataatttgtaatataaaaagcttttgctttgtatttaaataaaaataatgaataatcctaacttcactaaaatctactacatctgatattaatataaaacttatattcattagtttcattcattcatccttctactttttttttttctttttggagacagagtcttactctgttgcccaggctggagtacagtggtgcgatcttggctcattgcaaacaccacctcccaggttcaagcgtttctcgtgcctcagcctcccaagtagctgggattacaagcatgcaccactatgcccggctaattttttttagtagagacagggtttcgccatcttgtccaggctggtcttgaactcctggcctcaagtgatccacccacctcggcctcccaaagtgctgagattacaggcgtgagcccctgcgcccagcctacttctttgtattctacagatagaactatcttagttacgttgaaaatggattggattggatgtaattaataagactctgaggtccaccttgcagttagaatactgctaatagtgaagtattaccaaaaaaggtttactcttcatataagatgtttgacaaattagtaaaatgaatgacatcccgaatttagagtgtacctttggtctttatcctacccactacatatacagtagtaattttgcatatatttaaacaagcaaaagaatttgaccttttgtttataccaagtgaaggatccaaaaacatttattaagttaaaaggctaaacacaaaaaacaagcagagaaaaatgattaaacaactattaggaattaaatacttttatattattttaacctgcttacccgaagctttaatggggcaacattcttctgagttccactccaaagttcctgcactaaatcaccatagcatttagccatatgccccttcataccaatgggatttgtcctagaagtttgagaggaaaatttgttgccaaagattctcataaatcacaatcatgtgggcgcaaaaatgcctagcatctcacatcaaaatatcttttctttttgaaacaagagatgtattccttggcctatttcatattaaatagggcaaataagataaaatctttctcccacagggtgaaaaaagaggaaatttaggtgatattgggtttatatcaaagtcacaggttaagaggccagtgactccagaaagattacctgttgagttcataaagatgtctccctgagataaaatactgtgtcagtggctgtgtgttactaacacactggatgcttgagttcatgaagcatgtgtttcccagattgcttagacctgtggctcccttttctgtgggaactggaacaaacaatatgagaaccaaagcttagctgtagtaatatgccatggcacaaacagttacttatattcaatgaaaaggttttttataactctcataatcagctaaatggtgctaataattctctagcaggtctctgaaatgctagagaaggcttttcatggagtgtctggcaacagtgatgatccatgctcatttgtaacccagaagcagcaattattctttttaattgctatgatttttcaaaataattcaaacaattcttcttctagtatgtcttttaaaacatataaattatttaattgcagagttagaaagaaatttagaaaataatttgatggtgggtttgccaacatcaaatgctgcttcaggaaaaaagaaaaagaagaaggccctaattacttttgaactagaaaaccaaaagttgttagcactttaacagttgagagaagaaaaaaaaagaatacatttaaaataatctctttaaaaaataatactggagacttacccttgtgtctatctattttactactatttgctataaaagacatctcctcaggccaactcatatctttgttgcgaactggaaggacagataggaatgtgttaatttcttatctatctaatttatacccattcgattgctttttttttttaaagacatcttattcctaaatcagaagttttaaaatctagttaattttagtacatacattgcttaacgacgaggttatattctgagaaatgcatcattaggtgattttgtctttgtgtgaacatcacagagtgtacctacacaaacctaggctatgtatggtataggctgtcgctccttggctacaaacctgtacagtatgttactgcattgaatactgtaggcaagtgtaacacaatggtaagtatttgtgtatctaaacatgttagaacatagaaaaggcacaactaaaaatacagtattataatcttatgggaccactgctgtatacaggtcttttgttgacaaacatctttttgcagcacatgcctgtaattggctctaaaaccattcctactcttcatattgaggactttaaagtcacttggtttgaataatcttatccctcaattacctacttgaagtaaaattatactcaaccatctacagaagtaattaaagttcagaaacaatggaatttcttatacttaaaacattagaaattacaattctttcttaaattgtaacaactgtcagagtaatttattcctttttttttttttgagacagtctggctttgtccccccaggttggagtgcagtgatgtgatcttgagtcactgcaacctccgcctcctgggcttgactgattctcgtgcctcagcttcctgagtagctgggactacaggcacgtgccaccacacccagctaatttttgtatttttagcagagacagatttcaccatgttgtccaggctggtctggaactcctgacctcaagtgatccacccatctcagcctcccaaagtgctgggattacaggcgtgagccactgcgcccggcctattcattttaatacaaaggcagctaacaatgttgccacaaaacttgatgggaaaagatacacttaaaaagtttttaatggcatgtgcatgccagtgtgtaaatctatgaatatacaaatagctctgtcagtgagtagccaatgttggtgactaatgaaagcctgtgctactaactatgcaagaaagttgttctttttactcaaactcaaagcagcaacttgaaaattttaaggaactataaatgtgtaaactgaattcacttgttttttatctaccattcccattctttgtcagtcaatgactaaaaacagaatattttccctttaaagcaatctaaattgtatggtaggattacataagagttcaaagggttttctttttcttttttttccaaagggtttctttatcataaaaacataataatcaaataatagttgttttggagaaaattataaaatgggttattagtaactctttaaattcttccccttgaaaatttaatatagatgcatgcttccatcttgtaccttcaattaccaggtgttgttcatcctggattttcaaatattccaatttatgatcctcatcatccagaagagtaaggtagttctgtgtaaggaggaggaaatgtttttgttatttggttagtaaacttgaaacaaatacagagataaaaatgagtaacaattaaaaaaacaacttctttgtagttatataacatatcacaaatatctggcctactatagttgttcataaatatttataacttaggtggcagtatgacagaaagacaatgtgtacttcataagcgttatctttctcttttttaaaatttcaataggtttttggggaacaggtggtgtttggttacatgaatacgttttgttttttgttttttttttttttaaagatggagtctggctctgttgcccaggctggagtatagtggcactatcttggctcactgcaacctctgcctctgggttcaagcaattctcctgcctcagccttctgagtagctgggactacaggctcccaccgccatgcccagctaatttttgtatttttagtagagacagggtttcaccacgttggccaggctggtctcaaactcctgacctctggtgctccagccacctcggcctcccaaagtgatgggattacaggcgtgagccactgtgctcggccacaccattagtttataatgtaacatataatctttgtaacatgtaatctttatatgtaacaataatctttgaaagatagtactgtccatggtgatcaattgctattatggatctcagagacaaatattacaagtatacatatagtaacttaaaagatgaacttttcactgatatcctagacatggcttttagcataattattataggtaaaatcccatactcatgaaatatgatttaacacttaattagccttgtgctctttggcaacatatgtactaaaattggaacaatacaaagaagtttagcaaatttcttttactatttaaaattaaacaaataccaacaatcagactctctatgactctgagatgcctcttacctcactgttgtatagccacaggcgcatatcttcctctttaatgcgcagcctttgagatagatattcgtgaatttccttgatggtctgcattcgactaaaacagcctgtataggctaatacccgctttaaaggtgcattcggagaaggtacatttcctatggttacagtaatcacagtaagaaaaaaggcagatgtgaaaaagaagcacccctctcagcaatggggaccatactattttaggaaataataatgagaaatgagaattacaggtgtaataattttataaatgaagagtaccaaaacgctttaaaatgcaggcaggagacccaagttctttttgtttgtttgtttgtttgtttgtttttaatagatggagtcttgttatgttgccagactagagtgcggtgctgtgattttggctcactgcagcctccacctccaaggctcaagcaatcctcccacctcagcctcctgagtagctggtactacaggtgcacgccaccacatctggctaatttttgtacatttttgggtagagacagggtcttggccatattgccctggctggtctctaactcctgggctcaagcgatccacctgcctcggcttcccaaagtgctgggattacaggtgtgagccaccaagcccagccttccaggtgttttaaagtgagtccaaagcctcaactttgaaaagatgagcaaaggcccaaggcccaaggtccaaattattggcaatatttggataccaagaagagtaggaacatgccagaaaacaattggcattgatatctggctgcactcagctgagtcacagtcaatagcaaaatgaaataaaactcagtgaaaaaaaaattaggacagagttaaaaaaaaaaaaaactcagtggaggaggtaaaatgagatgggatttgaatcccacagatagataattggattcacctggtccactttcctaaactttctttgaatcactaatcccatcactttcagtcattaagtagctcaattatctggcacagtggtacaactgcaccagaaaacatatgtatatctattacatatcaattaaaaaaaaagagaatttgacataaaattctaaataggtatagactctacatagccaaacagagttttttattatcattatttgagataaggtctcattctgttgctcaagctgtagtgcggtgcggcaatcatggctcactgcagcctcaacctccctcattcaagtgatcctcgcactttagcttcccaagtagagacagggtctctctatgttgcccaggctggttttgaactccaaggctcagggaatcctcccaccttggccccccaaagttctgggattacaaactgagattacaagtgtgtgagctaccacatttggtcaaaacagagtttcaaattgaagccaagaagtttcccatggccaaataaacaagtgcccaataaggaaaaaaaaaaaatcgtattagcctgtccacccagtaagttgacgacagacatgaccttgaattcctgaagggctaaaggtagaaacaagaagagtggtaatacaggggaaaagagtaaagagtgaaggaagaatatatcaagtctcactacatacttcaaaagaggaggggtatgaaatgacaagagattatggaaatcaaagagaggtggcaaaaaaaaaaaaaaacatcattaaaccctggttaactactccgccaaaaatctagacaaaactgtggcttaaaatagtcttctctgctgaggctgtattttattgagcaacccaacttaaaaatataaacttatcaatataatgtacattccaaataattttctacccattcaatcatgagttagcttctttcttcctgaaaaatgcttttaatgagtcttccccactaaataaagctgagaaaatatgtgcatcatctacttttttagaacttcagaaaaggaattccctcacctaaggcaggctaaaaagtcacctaaaaaacaatgacttctatagccttgtctgtagaaaagcctacatttaagtaattgtaactgtaagaaggtttgaatacttgtcacttcaaaaggaataaaagagcctagtaaacagctgtaataaattgagtatttgagaaagatgaacatcatgttatggcagaacaaaacccaacccgtgatcagtttttgaacacatagcaagcaaatcttttacaatcagcaagcaaaggataatctctaaaagaaaacaaaagagcaaatttctccaattatacattttaggattagttgtaagattacagcaagaaagcatatttttataaattttaaaatgattaatgattgatttcacaactaattagcaaggaataaaatttcaaattaaaaccaaatttggagcatctgaaatatgcagttctaggattcagaagcatataagtatagtattcaagtcaatctctattgtcttaagccacaatatgaaaatttgagttttagaaagtttttatagcatagctcattaagcaggcagccacttactatacatacttttgtgcttttgaatagcaccaacaaatctagtggaatttatagaagcagcaaaaatctaggatcagcacaagagttacaaagaatacctactaaaagtgcaacaacacatcttgcctctcatgttatctttcttttatatatttttttgagacagagtctcactctgttgcccagaatagagtgcatggcgcgatctcggctcactgcaacctctgcctcctgggttcaagcagttctcatgcctcaccctcccgagtagctgggattacagacacctgccaccacacatggctaatttttgtatttttagtaaagatggggtttcaccatgttgaccaggttggtctcgaactcctgacctctggtgattcagcagcctcggcctcccaaagtgctgggattacaggcatgagtcactgcacctggcctcatgttatctttcaaagagaattgaaaaagttgtaatgggtgccatggaagcaaggctaatccttctaatggaaaattaaatcaagaatgtttcataaaggttctatctcactgttccttttttaaaaaatggtttccttcactttttatttttttttaagagacaagctcttgctctgttacccaggctggagtatggtggcacaatcatagctcaccacaaccttgaactcctgggcttaagagatcttcccacctcagcctcttgagtagctgagactacagggcacaccactttgcccagctaatttaaacaattttttgtagagacaggatcttactatgttgcccaggctggtctcaaactcctggcttcaaatgatcttcctccccagtctcccaaactgttgggattacaggcatcagccaccatgcccagcctcactgttctttgattttgctgttttccccaaagacaaagtttggtagacaggggccaatgctttgctataattactacgaaacactactgaaagaattcttaccaaacaggccgaggtggatggatcacgaggtcaggagatagagaccatcctggctaacatggtgaaaccccgtctctattaaaaatgcaaaaaatgagccaggtgtggtggtgggcgcctgtagtcccagctactcaggaggctgaggcaggagaatggtgtgaacctgggaggcggagcttgcagtgagccgagatcgtgccactccacttcagcctgggcgacagagcaagactccatctcgaaaaaaataaaaaataaaaaataaaagaatcttcatatattaaatgaatataacctttaatgaagatacaaaactaactttgttcaatttcaaaggagagcaagtacttcttttggtcagggtttagaggtagttcttgcatactaagttatttaaattataataacatgctggtattgttaacatagtctgagaatttgtgtaaatggttgctcatgattattaatattattttttgagacagagtctcactccgtcacccaggctggagtgcaacggtgtgatcttggctcactgcaacctccacctcctgggttcaagcgattctcttgccccagcctcccaagtagctgaaattacagcaccaccacgcccagctaatttttgtgtttttagtagagacagggttcgtgttggccaggctggtcttgaactcctgacctcaagtaatctgcccacctcagcctcccaaattgtgggattacaggcatgagccactgtgctcagcttattatttctttactgctgaagaataatttcaaacatttgcaaagcaaaagcacagagcaagtcttgcccgtcaataaagtttaaccttacagagaaatgaaaggggaactttttgcatgttatacattaaaatgggaactactttatatgtcattttgataggcttgatgttttttcaaagcaaatatatcactttaatcttcaaaaatatgccttttgctctgtactctctgtctcttatgtaaagcctctttagatcaagcatgagaaatgtatcatgttttgccaaaaaaccaaacaacaacaaaaaccttaaaaaacaaaaaagatgatagtataagaggaattgctttttacaaatttgagtggagttgaaaagaccagtcaatgactggtatactactacttagtctagtaacaatttacaatggcttgtctcaaagaaataaagcatgtaaaatctatttctatttattttctttgtaagtagaaaaggaaacatcccatctcagtttgctgttggaatgtttgcttcaacccctcatctagtcttgtgcatgaccatagttctaagccctgtaaaaattaattactgagtctgtaggaaagctgatgggaatgtgtatcaatacagtggcaccagacttcgagcaacgtagttttcacctttttttttttttttttttttttttttaaggaaatgcatggtattcttgctgcattcttaagttacctctcggtaaatgctgaggaaacattctcaggctcatcatacccatattcacccagatgttagactgctgtgtccgagtggcaggctgctgtctcaggaagagaagatagcggggaaataattccagctctgggatgtctgtcttgctgttcttgataacctattgttttaaaagataaaaagagatcactaaaaaaagaaacaaaacttgccattttaatctaacttctgagatttatttctaaaccaaaatgtccaacaagttcactagctacatttcagtaattactgaaactcacacatttaagttacatggatctgattactgttaaaattcctgctccgaaacccatttcctaagattataactccttgtagatatcttctccccttttatttaaaagcaagtaacaacactgaggaaaaaaaaaaaccctaagtattatctataattctactaccctcacaccataagtcttttcatttttacatatttcatgtatataaatgattgacattttaaggacaaattcataaaaattgagttacaagtcaaaaactatggaagtattcattagctatatagtcatgctgccatctaaagtttagcaatttacactattgccagtaatgtgtaagtatactactctcataaaaccttatcactggacatcatttaaaaacatccacatttcgttaatatgaagagtattataaattgcttaaatttttattttttgtactagtagtgaggatgcaactgttcccatataaaaatttactacgttctacttgcgtaaccagtctgttcacatatgttttgtctatgacttaaacaaaaaatttggatgtaaaaaaaactcagatttcacattgttggaacaggatttttaagtagttttaacctgcttataagcccacagacacaggaaaacatttaattatcaaaatattgttgtaagagtagtaaatgatcaatttcatattctaaaaggatagcagggttaacactgaaactccttttttttttttttgagacacagtctcgctctgtcacccaggctggagtgcagtggcccgatctcggctcaccgcaagctctgcctcccgggttcttgccattctcccgcctcagcctcccaagtagctgggaatacaggagcccgccaccacgcctggctaattttgtttttgtatttttagtagagacagggtttcaccgttgttagccaagatggtctcgatctcctgacttcgtgatccgcccgcctcagcctcccaaagtgctgggattacaggcgtgagccaccgcgcccagccaacactgaaattcttgaaaacagaaactctgtacagagtcttttaagtctcaggtgaccaggctttattttcctttactctcataaccaatatcttctgcaacagaactttttttttttagtatcaagagggagcaataaaaatcaaataaaaacaacactacaagccaggtgcagtggctcatgcctgtaataccagcactttgggaggccaaggcagaagggctgcttgagaccaggagttcgagaccagcctgggcaacacagcaagattctgtctcttaaaaaaatttaaaaattagctgttatggtggtgtgtgcctgcagtcttagctattggggaggctgaggtgggaatattgttcaaaccctggagcttgaggttatttttcataaacgtaattattaagaactcaaaatcaacatcaaaattacattagtctgttttataacagatttttactctttttagaagttaacgtaccatatctcatctatacaaaaccttcctggcataaggaagttttagcttggacattataaaaggaagagtgtttctttcttttttttttttttgagacggaatctcgctctgtcacccaggcaggagtgcaatggtgtgcagtcttggctcactgcaacctctgcctcctgggctcagacaattctcctgcctcagcctaccaagtagctggaactacaggagtgtgccaccacactggataatttttgtatttttattagacacggggtttcactatgttggccaggctggtctcgaactcctgacctcgtgatctgcctgcctcggccttccaaagtgctgggattacaggtggaagagtgtttcttaatataccaaaacaaatcccaccaaaacatcttgttatattttacttcatcaacaatgtaaaaagtgagtgtccagagtaccgagtgctgtttaccgtgtaagcacaacaaatggtgctatatactaatattttaatataatattctgttatcatatgttgtgatcttttatatgcccctccttcaaaaacataaaccacaaaaatccaccaaaagctacaagaagaatccaatccctaactagatacttgtgtgattgttaggaatagtagtttcagaaataacctctgcatcacgccctacattcactgaactttttggcactggctcttggcctgtcttcccctccagcctaagttccacatatcctaggtgatgtctacttttatgtggataacacattcaacagcctcctatttccttgcctttatttatgaatgaatgaacgaatgtgaaggaacttaacattgaacaatccacacaggttcagaacactcttctaccacaaggtaagagctactttgtggttagtgagagtcacatagaaaaagtaacagaagacccccatctatgactgctccttatataaggcactattaactatacttactggtctaggtaaggccaggtttgctccataccagtgataaagtgctctccacacaggttctgggaccatttcatagtctcttccatgaatcagctgtggagttcgttttaatcgtcctccttctagtgttaatgatgtagcctgagaaagaatagaatgacaatgttgactttcaatattacaaaagtttttgggtctcagcaatacctagaaacaggaaaacaaactcatatatcaccacccagtttcatgttgctggaaaaacttaattttttttttttttttttttttgagacggggtcttgttccgtcacccaggctggagtacagtggcgcgatcttcgcttgctgcagcctccgcctcccgggttccagtgattctcctgcctcagcctcccgagtatctgggattacaggcacacgtcaccatgcccggctaatttttgtatttttagtagagacggggtttcaccatgttggccaggctggtctcaaactcctaacctcaggtgatctgcccacctcagcctcccaaagtgctaggattacaggcatgagccaccacgtccagcaaaaaaactgaatttttaatgagagatttttatttttgactttcaaaataaactatgtaagaaatgaaactcaaagcatatcatttggaaaaatcactaaagcacttgaaataacttcacagatttctttcaaacaataaaaaatactagtttggaaaaaaaaattcatacatagcgtatgtgaaacaacattttcagaatagctgtcctaagtaagaataacaataatgccaagggttactaaactacttctatgtaagttctaaatcataaatattctcacagaaatgtactatacaaagagatgtccatctataatacagtaattaaatgaaccatcaatgttttgctatgtgctaaaacctctgaaatgaaatttattaatagcttgcaagagaataattttaagtttagatgtaaaattacttacctttactggttcttgagttactaatggctgattatcaatagcccctggtttctgagggttaaggtgcaacaaaatattcccattggctcccagcaaacactggttgttattgtcagaagtgttatgttgtcgagcaaagcaaacatctgcccctggtgtggcagaatacagaaagcctataaaaaaaaaagaggatagaatctcttatttttagttattatacataaacaggcttgaggatatgaactcaatgcccatgtattgtattactctgttgacatgtcagtacagattaagattctggtaattctgtagaagacaggaaatgttatccttctctgaacaatacatggcatggtactaaaaataagagcttttaaaattattaccaaatgaacatttggccaccctcctagaatatctaataattcataatgagaattatatgtcctccgactggaagggaagagctgggctaagtggctgggcttctacatagcatcctttaattattttcctcaaactagaaaaatattccaaatgttcttggtagataatggtgatatgaagtcactaaattaaaagaaaactaaaacaagaactccaacaaaagagtaatgggggctagatcctattgtatctatgaactcaatgtccacaagttcttttgaaagaaatacatgatctttacaatacgaaaatatgcacagaagatgattaaccatggcttagagttgtgagcctcagtggtattttaagccatttcaactctcaactacatgctaatctttggtaaacaatctagcagtcatcactttgtaaccttctgcctgtggtatgcagcctttgggtgtcacaagttatatggtaagcacataccaaacaggatctttagatggggttaagaaataatcctcatgttaaagctgatgacagcacttctaggactgctaagtgatctttgtaataccagaaagggagggaagaagcagattctacaaggagctttgtgaagaaaatgctagctctgtccaatttgcttacaccttccacagaaaaggaaaagaacatcttggaagaaataataacacacgccaggaggaatggctcatgcctgtaatctcagcactttgggaggccaaggctggaggactgcttgaagccagaagactgcaaccagcacaggcaacatgagacctcgtctctacaaaacaattaaaaaattagctgtgtgtggcagtgtacacctgtagtcccagctaccaggtaggctaagacaggaggatcatttgagcccaggaactggaggttacagtgagctatgatcatgccattgcactacagcctgggcaacagagtgacaccctgtctctttaagtaaataaataaataacaatagggtaagattgagggttctgctactgtaccagaataacagcaatcaactcaattcagctgggccatagaaataccacagcatcttccttgtaggtgtggaaacatgaagttttaggtaagtaccaaggcctaaagggaattatgggaggcatctgaattctttctcagtattttaacaaaataatctccatattttggcctgaaatatacatagaatctgatgtggggtgcatttaatttaattatgtttatggctagagagagtcctggagatgactatctttgaaaatttaaatttactgactaaataatttaatagcaatagggaaagatggggcttgattgatgaaaatagtgaaaatagccgcatgtgatggctcatgcctgtaatcccagcactttgagaggctgaggccagaggactgcttgagcctgggagtttgagaccagcctgggcaacatggcaaaaccctatccctaaaataaaaacacacaaaaaatggctgggcatggtggcgcgtgcctgtagtcccagcttcttaggaggctgaggtgggagaattgcttggggccaggaggcagaggctgcagtaagccgtgattatgccactgtactccagcctgggtgacagagcgagatcctgtctcaaaagaaaatagtgaaaatatttccatattgagagatttaatgaagtataatatggaaaagaggttttctttgtaaaaatactaatatattcaagaattttacaattgaccatttcattcaaaacttatttctgttaatggaagcctgatctcctattaccatattcactacagcctctgtcaaattagactgccttaataactatccatggggaggccaggcatggtggctcacgcctgtaatcccagcactttgggaggccgaggcaggcagatcacgaggttgggagttcaagaccagcctggccaacatagtgaaaccccatctctactaaaaaaatacaaaaattagccaggcgtggtggcgggtgcctgtaatcgcagctactcaggaggctgaggcaggacaatcgcttgaacccagaaggtggaggttgcagtgagcagagatcgcgccactgcgctccagcctgggcaaaatgtgaaactcagtctcaaaaaaaaaaaaaaaaaagaaaagaaaagaaagacctatccagggggaataaaccaataaacctcaggggaataggtcatatttaccgctgccagcagtttctgaggcttcagatgcagtagaaatgttgtctgaaaatttctcttctgtagtattcacgtaactgaggctgcttccaattctatcttcgacctgctccataggatgggctgcagttccaaatgagtattttcctccattcaaaacagatgatggctcaattaccacagggttggcatcctaaaatcaggaaatcagagaataagaagcaaagtttataatctgacaactatgtagtcttcagaaacaaatctcacaattatctatttttttaagtctcctgtggttggccacagacatttaaaaacattctaatacatagctatattttaatctctttcaggaggaaaagtatgtatatagataaaattggcaaggtagacaaaacagactgtgaaggattttgtgccacataaagtaatttacactctattctgttggcagccatttttttaacattaaaagtaaataaagcttaaatttttttcttttcttccttatttcccatagtacatgaatgtatataatttttttattattaaagattacatggtcaatgtagaaaatatagaaaacatgaagaaaatatcacatgtactcagattccatcatttagcaataactgtgttttagttcttatgactgaaaaatatgtatatatgtaaaagatgagtggtgtatgtacatagagtgaagggcaatgctatgacttatacctatgtgaccttctacaataactgaacacacctttaatcccagcactttgggagaccgaggcagatggatcacttgaggtcaggaggccaaaatggtgaaatcccatctctactaaaaatacaaaaattagctgggggtggtggagggctcctgtaatcccagctactcgggaggctgaggcaagagaatcacttgaacccgggaggttgcagtaagctgagattgcgccactgtactccagcctaggcaacagagtgagactctgtctcaaaaaaaaaaaaaaaaaaaaaaatcatatttttttctttcaccaaacattgtattgtttatatagtgctaatatgctaatctaacatttcatattttctctatttctctttttaacaaagagagaacaatcctaaatagcagagtcttcaaaaggcaacactattagctggaatttaataatattattgccttctatttctggcaagcgacactagttttcttttctttttttcttttttttttttttttgagacggagtcttactctgtcacccaggctagagtgcagtggcgtgatctcgggtcactgcaacctccacctcccaggttcaggagattctcctgcctcagcctcccgagtaactggaattacaggtgcatgccaccaagcccagataatttttgtagttttcatagagatagggtttcaccatactggccaggctggtcttgaattcctgacctcaggttatctgcccgcctgggcctcccaaagtgctggaattacaggcgtgagccaccatgcccattcagtttttcttttcttttttttttttttgagacagggtctcgctatgttggctaggtcagtcttgaactcccggcctcaagcaatactcctgcctgggcctcccaaagggctaggattaaaggcgtgagccactgtgcccagtggacataagttttctacttaaagtagtgatataaagtttcctttgaaaatatgattaaataactaattaatcacaaacagttataaatttctttgttccttgtctgttaccactgcttcactttagtagccaaaaaatttttttaaattttaagtaaaaatggcataattatttatgtaagttaactgtatggcattacatgagaaaaatggtgaccatagtttaaaaaaatgattaagaagtaggaatctatattacatatgaattttggaccatcaatttttaaaatttagatggttcaccaaagtagtcaaaattctttttttttttttgagacagagtcaagctctgtcgcccaggctggaggtcagtggtgcagtctcggctcacagcaacctccgcctctagcttcaaatgattctcctgcctcagcctcctgagtagctggaactacaggcacctgccaccacacacagctaatttatgtatttttaatagagacagggtttcaccatgctggcctcaaactcctgaacacaagtgatccacctgccttggcctcccagtgtgctgggattacaggcgtgacccactgtgcctggcctagaaaccaaaatcctgtagacaagacagtagaaccaaaatgatctatgtcaaaaaagaagtataaattagtcctaagtgttaattttcttaaagataatatcaagcttctcacagcttttctaatatggaattcataccaacacaaaatacatgacatttaaattaggtttcttttttctttttctttttttttttttttttaattaaaacaagttttggccagggatggtggctcatgtctgtaatccctgcactttgggagccaaggtggctggatcacttgagctcaggagagttggagaccagcccgagcaacgtggatagatcccgtctttacaaaaaaatattaaaaaaaaatagtggggcatggtggtgtgcacctttagtccccagtaacttgagaggctgaggtgggaggatggcctcaacccagggggtggaggttgaagtgagttgagatcatgccactgcactccagccagagcaacagagcgagactctttgttttttttgtttttgtttttttttttggtagaaatggagtcttactgtattgcccaggctggtctcaaactctagcctcaggtaatcctcctgcctcagtcacccaaagtggtgggattacaggtgtgagccacctcacctggttaaattaggtttcaaaagaaaattttccataaacataaatgccttattatttaaatcaattcaacttttttttttcacttatgctttttgatttttttagtctggagtatagcaaaggctctttttttaatacagggtcttgctcagtcgcctatagctcactatacccttgaactcctgagctcaagtgatccttccacctcagctaggaccacaggcatgcatcaccatgcccaactaatttttaaagttttcatagagatggggtctcaatatgttacccagactggtctcaaactcctggaggatccaaacaatcctcctgccttggcctcccaaagtactaggattacaggcatgagtcacccggccaaaggcattttttcatttttaaagttctctatgtgatctcactacatatgcagccagaattaataactattgccctagtgaggattatagtctcatgcatttgtttttataatgtgctccagatgttaagagcttagaaattgacttgttattaaatctgctacctgctctggaacttgtgttttagaagaagatttagatttatttagttttcaggtcatttgcttcctgcccataaagatggagcaagacagacagcaaaaccattttgaaagagtaacagcgccacctttgagaaaaattaaagtcttccaagtcactttgttttcctccagaaaaatcactttagttttgctataagtgatcttaaatgatgtttcaataaccatcacatttttggcaaggtaatccgtttataaatttatactcacttctatattccatttatataaagttgatgcattacaaattactttttttttccttctttttttgagacagagtctcgctttgttgcccaggctggagtgcagtggtgcaatgttgggtcactgcaacctctgcctcctgggttcaagcaattctcctgcctcagcctccggagtagctgggattacaggcacgcaccactgcgcctggctaatttttgtatttctggtggagacagggtttcgccacgttggccaggctggtcttgaacccctgacctcaggtgatccacctgccttggcctcccaaagtgctggggttacaggcgtgagtcactgcgcccgaccacaaattactttctaaaaaatttgtagtaatatattttgaggaagattgggtctatttgagcaaacaattttcttcaagttttcctctaagatgggcatgtaagagaatttcaaggagtaatatttggaattgtatcttaaatgttttaacatgtttgaaagtcttacatggtgcctatgtttctaaagaaaatgtaaatgaaaccattcctgtaataatgcttctcattctgaagagctcagtccataggttaaatctatatatatcactggcaagaaaacaggataataaaaatattaccaggcattaaatttgctaggctaaattttataataatttgtgaacaggatgattctaataacttctcagagattgcaacatttgcctctagcaactgcggttctaccacatgcttttaacatggtacagtgagtaataacctttagacttggagaatatgggcttttctttgcttctcttccaatgctccaaacaaactagactggtctgtcttctcattgtcttcggctttcttttctattacaggaacctgatgctctcactgttctccactgcctgaaactgtcagcacaactcaggttccttcttccccttcctacacgcttatttttcttgttccttctacccttcttggctttcagtgaaatagctaccttttcatccgattaatcttattaccactttccttctataagatgaacaaaccaatcacagttatatattgcagaatcttagagtcactagctttttttgactgttcatttctggctgcttgcggaaatttttgtttttctaaaacatcaaaggatcatgttttgtttttattgacttcaggggtctggaactattcaaaattatcctagaaccctggttttcagaagatagatttctaaataggtaaagtttcacctgtagagagaaatgtcctcattttctgagtcaacaattcacaaaaggactaggtacttattttaatataagagaattttattttgagattttaggattccctgtgagttgtataaatagtttatgtgttctaaaatatgggtcaagattcacctttttctctattgatgatactactactttttatgccctgtacataggtatgttacaagaatcaattaacagttatgtcaatttcatatttcactagtgactgaaatgctagctttggaaaaatagagggcagcatggagcaacagattaggtactaaggcaggactcaggacactgagctctagagtgctagataaagtaataaaataattgtctgatacagctttgggcaattataaaacctaaggacctcagaggcttcatttgtaaattcagagaagagaggtgtttcattccttttatttcccactcaactacacatgtctgaggcaggaaaacaaggctgccccactcgtggcagtcctgacgacgatcctcgagggctgctcttggcctccagccttggctaaggagaacagggaccccccaaagcccatgggagagaggcacgaaaggtgatttaaagtatcttctagctctaaagttacgtgataactaaataggaaaatctgcatgtgaatagtaatagctgctccttcatagttctcaaaaaggaagatacacattatgtaatgtaataatgatagaaaagatttcaccattcttccccatttacatttttttaggagattacacatagaagaataaagcttgacacattaaagcggggaaagactggtaagattccatgagcagagacacaatcaaattattcatgctccagtgaatcagcaaatctggggttagccacttctaagaaaggatggctcatttttcctgatcccttggtctctgatctttccatttagtcttgccagtatttgaaacatactaccctcacaattagtaatattcgtaagtaaatatgtcattttatgaagagaaaaaattaaagctaagtactctcttaggtaggcagatgaagctctaagatcaaattatctgacatgtcaacactaattttctttttcttttttttttttttttttttttgagatggagtctcactctgtcatccaggatggtgtgcagtggcatgatctcggctcactgcaacctctgcttcttgggtttaagcgattctcctgcctcagcctcccaagtagctggaactgcaggcacacgccaccacgccaggctaatttttatatttttagtagagtcggggtttcaccatgttggccaggctggtctggaactcctggtctcaagtgatctgcctgcctcagcctcccaaagagctgggattgcaggtgtgagccattgcacctggcccaaattttttttttttttttttttaaacaaggcgtttgtcaaagtggccacatggactggaaagagaaatttgatttttttttttttttttttaaatacagtctcattctgttgcccaggctggagtgcagtggcatcatcttggctctctacaacctctgcctcctaggttcgagctattcttgtgtctcagcctcctgagtagctgggattacaggcatacaccaccatacccggctaatttttgtatttttagtagagacgggttttctccaggttgggcaggttggtgctgaactcccagcctcaagtgatctgcctgctttggcatcccaaagtgctgggataataggcgtgagccaccatgcctggcatgaaagaagaaatttaaatcctcatataactactgctactactaccaccattattacctttaaccttatatagagtttctatctgccaggcactgggctaagtgcttcacatgtattaactcatttaattctcacatccctacttaaatagatattactattaatctcattgttcatatgtgaaaactgaggtagagcaagaagtagtaatttattcaaggtcataaagcaagtgcaagggacaagagtccaagctcactacaattaccttattgaagtttctcataataatagctacctatttagtacttactatgtaccagacactgttttaaaatacttaacaagagtctgggtgcctgtaatcctagcactctgagagcccaaggcaggagaatcgcttgagcccaggagttcgagactagcctggcaggcatagtgagaccccatctctacagaaaatcaaaaaattagccaggtgtggtagtgcatgcctggagtctcagctactcaggaggtgggagaattgcctcagtccatgaggttgaggctgtagtgagctatgattgtgccactacactccagcctgggcaacaaaggaagatcctgtctcaacaaacaagcaaacaacaacaacaaaacacttaacatgcatcaaactcatttaatcctcgtaacactatgagggcgattattattattactctaattttacacatggaggaaacaaggcccagaatgtcacttttttaaaaaggttacttgaattcagtttaaaaacatttttaaaaaatctgtcagtgtgcagttatttgcatttacttttagaaaagaacacttttctaattaaaacatgttcagaggattgttattagtcaacttacatttcccccaccttattaataagttgccatagttccctgtctctttatttagtaaaaacacttttctaattaatatgtattttcagaaagtactgctgttactccacttacatttttccccatcttattgaataaattcccatactctgcctcctttctctccatataaagcgatactcctctcctcccaggtttattgtaactctaagtttgcctttatttattcatttatgttatgagacagggtcttgctctgtcacccaaactggagtgtagtggtgtgatcatggctcactgcagtcttgacctatcaggctcaagcaatcctcccacctcagcctcccaagtagctgggactacaggcgcacactaccaagcatgactaatttttttttttttttgagatggagtcttgctctgtcgcccaggctggagtgcagtgacgcgatctcggctcactgcaagctccgcctcccgggttcaagcctttctcctgcctcaccctcccgagtagctgggaccataggcgcctgccaccatgcccggctaatttgttgtattttcagtagagacggggtttcaccgtgttagccaggatggtctcgatctcccgacctcgtgatccgcccgccttggcctcccaaagtgctgggattacaggtgtgagccaccacacccggctcaagcatgactaatttaaaaaaaaatttttttggaccgggcgtggtggttcacgcctgtaatcccagcacttcgggaggccgaggagggcagatcacgaggtcaggagattgagaccatcctggctaacacagtgaagccccatctctactaaaaatacaaaaaaaaattagccgggcgtggtggcacgtgcctgtagtcccagctactcgggaggctgaggcagaagaatggcgtgaacctggaaggcggagcttgcagtgagccgagatcgcgccactgcactccagcctgggcgacaaaagcaagactccgtctcagaaaaaaaaaaatttttttttgttttgtagagatggagtctcactatgttgcccaggctggtcttgaattcctaggctcaggtgatccccctatctgggcgtttcaaagtcccgagattacaggcccagccagacttcattcttaagtaaattttaaagtttgcatttgacagacgcatgctagaaaataatatcaaatgccagagtggagaagggaatatgtagattctcccatgtatacctctcccttactaccctccccaaatttctttagtgcacaaaaggactatggtaggcaacaataaaccaggttcatgttcttgtcagtgcagttcagtctgtttataagggacacgctgctaagagtaagatctctattgtgttcctacggaaaacaaaacgtaatacatccaagacaaaactaggttattctttgagtctatactcattaaaacattaacaaccactcattctaaggccaagctacaaatataaaaaccaaaaaagtatttcaaaataatgactgatgctgtaccccaatattctcatttttctacctacacataccatcattatctacctacaaggtccaggaagtcatttgcctactttttattccttcagagacaccaaagtccgtgtttcccaattaatatattttacatgtgaaaacacattaataaactctgcaaaatggaaaaaggatgagaaagaatgatgagatagataatgtaaaaagtatgtaactaccaatattctgataataagcagtgacagaggaaatacaggcaaataggaatcaaatgattagaattttcgttagtgatcatttggcaatgagtgtatatatcagttggctctccaagaaggcaaatacttgattcttggcattactcttttcaattttctagttctgaaaaaaattccattttaatggaaaaggtaaaataaaggacaatgtaaatgatgtagttgagagaatataagctttaaagtcagtccttcggtttgatcccagatcttccaccctgatcatgacattcaggttactttttctttcagcaccaggttccccacaggtaaaatgggtataatattatcttcctcacaagggtggtgcgagaaataaatgagatgtgatgtatgtgacatatgcaggtacccccgtacccaatattatctttttttagggttgttgcaaggaaagaaatgtatgtggaagtgtaatcacaaagcctagaccatagcaagtatcatataaacactcatttcctttcccttcgaatctttatttaagttggagcattttattattggctggtagtcatagcattttattattggctggaagtctcacgcagctgaaaatcctgtgaaaaatgtaaatagacaggaatctaactcacgtatttgacatattctttccactgttgccaccactgcatggagatgataaaccagttgtgtcctgcttgcagaccatacctgctctctcgttctaaccatcctctgtatgtacaaaagaaattaaatacatcaaacaaagtgtgaaataggtggcaacgcacaaaaattatcattagaagttttataaggaaaaccgcgaaacatttagatgtaattaggagagactgccaaaacccaattagtaaaacaacactgtttctattgataaaccaatttcaagagtcatagggcagtatcaagaataattacttcaggaaaagattctgggaaaaacttaaaaattaaaaaaaattagaaaaacaactggtgtttccaattaattaattaattacattttttgcagaatgttcatgtaaccaatgatgttcttcaaaacagccttattgaggaataatttacatatatataaaacttacctattttaagtgtacaactcagtgattttgataactttacagatatgtgcaaccaacaccacaatcagtttgagaacatttaaaacatttcaattaatccaaaaagactgctgtagccatttttggtcaattcctattaccaccctcagcaacaggaaaccactaatctatgttttgtctcttacagatttgtcttttctcaactattcatataaataaaatgataaaacacatggccttttaaaaatttggcctctttgactttgcgtgtttttgtggttcatctattattgtggcagacatcagttggttgtgctttattactgaatagtattccactgtatgtatatattacattttgtttatccatccaacacctaaagaacatttgaaactggcaagtcaatttccaaagtggctgtccatttaacattcccatcagcaattctagtgggtgtgaaacactgttacactgggattataaaaaaaaaaatctactctatctatctatctatctatctatctatctatctatctatctatctatctacagaatctcactctagcctaggctggagtgcagtggtgcaatctcagctcgctgaagccttgacctcctgggctcaagcaatcctcctgcctcagcctcacaagtatctgggactacaggtgtgtgctatgcccagctaatttttttttttttttttttttaactagagacaaggtctcactatgtcacccaggctggtcttgaactcccaaaagtgttgggattacagacatgagccactgtgcccaaccaaaaactatttatttttttgaggtgaaaatggcataatatgaaattattttaaatcatacaattcaatggcatttagtacatccaaaatgctgtgtgaccacctcttattaagtttcaaaacattctgatacacctcaattaaaaagtcatccattaaatagttattccccattacccacttcgcccagaccttaacaaccaccagtctgctgtctggacctattgacttgcctgttctggatatttcatgtaaatgggatgattcaacatatgaccttttatgtctggcttccttcatttaacatgtttgtgaggtccaaccatgttgtagtatgtatcagtactttattcctttttatggttgaataatattccatggtgtgtatatactacatctcgtttaaccattcatccactgatggatgtatagactgtttctaccttttggctattgtgaacagtggtactatgaaagttgtgttcaagtatttgagtacctgttttcaattattctggtatatatttagaagtagaattgctggtacatggaaattcttgctgaggaactgccaaactgttttccacagtgattgcaccattttacatttctaccagcaatatatgagagtccctaatttccctacttgccaaaaccttccattttaaaaattctaataatcttattgagaagtagaatttcattgttttgacttgcatttccctaatgactaattacgttgagcatcttttcatgtgcttgatgatcactgaacatctggagaaacatgtattcaagtccatttttaggtgtctatttttaaattgggttgtttgctttttgttgttaagctgtaggagttctttatatattctagttaggagacccttattggattatattatctcccattctataggtttttttggttttaaaaataatatctcttgatgtataaaagttttaagttttgccaggtacagtggctcacacctgtaatctcagcactttgggaggctgaggcaggcgaatcgcttgagcccaggagttcaagaccagcctgggcaacatggcaaaccctcatctctacaaaatatacaaaaattagctgggcgcagtgcctcacgcctataatcccagcactttgggagaccgaggcaggcagataacctgaggtcaggagttcgagacctgcctgactaacatggtgaaaccccgtctctactaaaaatacaaaaaaattagctggtgtagtggtgggcacctataatcccagctacttgggaggctgacacagtagaatcgcttgaacccaggaggcagagtttgcagtgagtcgagatcatgccattgcactccagcctgggcaacagagcgagactccatctcaaaaaaaaaaaaaaaaaaattagctggttgtggtggtgcacgcctgtggtcccagctactcacgaagctgaggtgggagggagtttgaggttgcagtgagctgtgatggtgccactgcactccagcctgtgtgacagtgtgagactgtctcaaaacacaaaaacaaaacaaacgaaaacctttcaaattttgatgaaatgcagtagtttttctttggttgctcatgcttttggtgctacaactaacattccactgcaaaattcaaataatttttgaggaaatagttttgttagatatagagatcttggttacagtttttcccccactttcagttctttaaaaaaattaccatcccactcacttctggattccatgctttctgatgagaaacatgctattaattttattgatgatccattgtatgggacaaacagcttctcttttgctttcaagattctctctttgttcttggctttgtaaaatacagtttcattataatgcttctcagtgtggatcactttgtttatctttctttaagtccaatgagctttttgaacgcgtaggttcacgtcttaagaagtttaggacaattatttcttcaaatattctgccctttccttctctctcctttcctaagattcttatgttgacacatatgatgttgttctatgggtttcttacgttctgttcatttttcgtcattctgttttctttctgctcctcagtcaataatttcaatggacttttatttaacttctctgattcattcttctgcctgctcatatctgatggagaacccctctaatagatttctcatttcagttattgtagttttcagctccaaaacctgtttggttcctttttatactttctctttattgatactctatttgtacatatatcattctcttggtttcatttatttatttctttatttattagtttttgagatggagtctcgctctgtcacccaggctggagtgcaagtggcacaatctcagatcactacaacctccgcctcccgggttcaagggattctcctgcctcaaccttccaagtagttgggattacaggagcctgccaccaggcctggctaatttttgtatattttttagtagagacggggttttaccatgttggccaggctggtctcgaactcctgacctcaaattatctgcgccttggcctcccaaagtgctgggattacaggcgtgggccaccatgcccaagccaattctcctggtttcctttagtttgttgtccatcacctccattagctctttgaacatatttaagataattgattttaaatgtttgtctactaagtccaatgtctgtgcttcctcaaagagaatttctattaatttcctctgcgaatggaccacactttcttgtttctgcaattttttgttgaaaacaacattttgagcattaatggtaactctagaaatatttccctccacctcagggtttgctttcactgactgctatagttgtttgtttagtcacttttctaaaatatttttataaagtctgtcttccttgttatgtgtagtttcttaagtcttcatttcacttgtgttcgaagagctagtattttgacagtgatttcctagaatggcagaagtggggagagggagagaagaaaagagagagggagggagagagaggaagagaaagagaaaaaagggagagagagagagagagagacaaaagacagagacaaagacaaaaaccactactgtctttgcagaatggcgctgtgctggggcattcctacaatggtttacaactatgccttagccttcactacctgtacccttagtctagaagctcagccagaggtgaaagtttacgggtcttataaggtcttttctgagtgtgtatcttgttgttggcatgtgcaaagccttctaaattacccaatgtacagtgtgcttttgggtactttaatttcccaaggaaactctcaagttcccaccacccgcaagactttcagcattctattatatgcctcaattaaaatattttaccccaggtgactgcaggtggctggctcgtttgccttacagaacttctgacgaataaccctgcctgcctttccatcctgggtaaattctgagttaagtataacatagctgagcatcttgcagtagcttttctggtagccccagacggtttagacaaacacaacttgttttgttttgtttttgagacagagtcttgctctgttgcccaggctggagtgcagtggctcaatctcagctcactgtaacctctgcctctcgggttcaagcgattctcctgcctcagcctcccaagtagctggaactacaggtgtgcgccaccatggccggctaattttttgtatttttagtacagacggggttccatcatgttggccaggctggtctcgaactcctaacctcaactgattcacccactgtggcctcccaaagtgctgggattacaggtgtgagccaacgcacccagcctgacaaacacaactctataaataaggtatgttctgctctctctgaaaccagggaccaggtgggttgccattttcaaggctgccattactaaaccagacaatggcaaatatatatacaggcttttaaaaaattattattttttttataattttttaaatcaacatttgcttagtagctataaatctttgtctctttcttcagagttccaacagagttgaaatgggcagtttgttctttatttttcaatgtttctgtggagagacaggctcttagagctacccactacataattttcactgagtcactcctctcattgtgcttttaatttgccttctctgaggaagcagaacatcttgtcatgtacttacatgtatggttaagagtctattcaactcttttacacattttaaattagattttcttgatgtcttaatgtgttgtaacagtcctttatatattctggacatgaatactttatcatatataaaatttgcaaatattttctctagggctgtgaggctgtagcttttattttcttaatgctctctcttgaaactcaaacgtttttaattttttctaagtcttacacttttttccccacttataaactgtgcttttggtgttatatctatgaaatcttctaatcccaaatcacaaagattttctacatttgcttttctagaagtgttatatttttagctctgatgtttaggtatagggaatccattttgagtatacttttaagcatagtgtgaggtaaggggtctaaaataatctgtttgtgtatggatatccaaattctcctgcaccgttttttgttttttaaagagacagaatcttgctatgttgtacaggctggtatgaggtggctattcacaggtgtgatcactgcatactcacactaaagccgtgaactcctgggcttaagtgatcctcctgtctcagcctcctgagtagctgggactactggccagctacaccactgtgctcagctcctcctggaccatttttttttctttttaaagtcagtcctttctctactgaattttcttgacatctttaaaaaacaataaaaatgataataaaaataaccattgaccaaaaatataagggtttcctttttttcttttttcaggcagagtctcaccgtcacccaggctggggtgtagtggcatggtctcagctcactgcaacctccgcctcctgggctcaagtgattctcctgccttagcctcatgagtagctgagactacagtcgtgtgccaccatgcctggctaatttttgtgtttttagtagagatagggtttcgccatgttggccaggctgatctcaaacttctgacatcagtgaaaccacctctgcctcctaaagtgctgggattacaggcatgagccaccacgcctggccaagggtttccttttaaaatatcaattccattttactgatctctatgattctccttattccagtacttgattaatgtatccttaggtaaattgtgaaatcaggaagtctaagtcttctgttttttgtcatttttttgaagttgtttaggctagtctgagttctctgcatttccctatacaatttaggaatagcttgtcaatttatagaaaaaagctgggatttgattaggtgtgttttgaatctatagaacaatttgagaaaattgccatattgacaacaataagttttcaaatccatttacgtacattttcttaaatttctgtcagcaatgctttgtatctttcagtgcacaagtcttgcacttcttttgttgaatttgtttccaagggtttgatttcttttgacaatatagtgaatggaattgttgtcttctttttaattgtactttcaaattattctatctagtacatgacaattcaattgattgcttaatcattgatcttgtatcctgtcatgttgctgaactcattttattaattctaacagtttttctgtgaattcttcagggttttctacacataggatcatgttatctgcaattacagacagttttatttttctttacaatcttgatgccttttatttccttttcttgcctaatttaactagcttgaagctctaatacaatgttgataagtgcggcaaaagcaagtatcctttcctgatcttatgggaaaagccttcagtgttctaccattaagtatgatctcagctgtatgtttttcaagatattttttagagtgaggaatttcccttccccaaagttgtgaatgagcatgactgtgctctagtaaaatgttatttatgtacactgaaatgtgaattttatataattgtaaggtgtcacaaaatatttatccccttttggttttttctaagccacttaaaacggtaaaaacatttttagcttgcagattgtacagaatcaggcagtgggacaaagttggtcaatatgccatagtctgctgactaactgctggcctagtatatggtctatcctagaacaatactctgtctacatttgaatatgtattctgttgctgttggctgaagggttctgttggtgggtgcatatatcatcatttatcataataaaatgtctctctggctccagtaacttgacttttgtaacctaaaagccattttcttttcttaacagtaaagtgattttagttcacgtatggctatatttgtatggttttatcttttattcttttactttcaacctatttgtgcctttgaatctcaagtagctggattgtgttttttttttttttttttttttttgagatggagtctagctctgtcacccaggctgaagtgcagtgacgcgatctcggctcactgcaagccccgcctcccgggttcacgccattctcctgtctcagcctcccgagtagctgggactataggcgcccaccaccacgcccagctaatttttttagtagagaccgtgttaaccaggatggtctcaatctcctcaccttgcaatccacccacctcggcctcccaaagtgctaggattacaggcatgagccaccgtgcccagccaagtagctagatttttcaaaaaacaagtcagtctaaatctttggcttttgattatctgttcaatctgtttatatttaaggtaaaaacagatgtggatttatgtctgctatttagttttttgttttctatgtatcaagtctatttgttcctctattcctctagttctttcttttgtggtaaataggtattttctaggaatttaaataggtaacattttaatgcctttttaaataaaactattttgggggatcattttcttagagattgttgtagggtttacaatatggatcttaacatagtctactttattgtttattttactttatgtttttgagatgtcatcttgctctgtcgcccaggctggagagcaggcgttccatctcagcttactgcaacctctgcctcctgggttcaagtgattctcccacctcagcctcatgaatagatagggttacaggcacgcaccaccacgccaggctaatttttgtactttgagtagagacgaggttttgccatgttggccaggctggtatcgaactcctggcttcaagagatccgcctgccttggcctcccaaagagctgggattacaggcgtgagccatggcacccagccaacatagtctactatgtttgattgatactaatttattccagtaaagtatagaaactaaaaaagtgtagaaactaaaacatagaaactttgctcaaatatagctccccttctactctcacctttgtgctattgttgtcactcatataagatcgttatatgtaatgggaacaacatggttttataattattgtcatgtaaaaatgtcttttaaaccagtaaaaaataaaataaacagaatggtatatttatactgtcttttattattacctatgtaatttctactattggtgctctttatttttttttttggcagtttttatggttttatttaaacataaaacatgcatatgagctgtctattcattttcttcacaggctggcattgggattggtgactctgatggccagctgggctgctctttccacaatgtctttgcagttcttggaggaaacactgtgggcaatctcagcacacttgttgcacgtcagcagcacttccagctccttgacattgcggaccaggaaattctggaagccactgggcagcatgtggtttgttttttgttgctgaaccttctacaaactctgttgtcaatacctctgggtttctgtcagttacacttagttttgacatatcagtgtaactggtgctggatgaaattcttggttctctttttgatgatcttggacttcacaaggggtctgagggcagctatgatgccaagtaggagatggctgccacctccgtaggcagcgccaaggaagagagcctctttatttgttcatgtggatgttaataaccgtctggtgtcacttattttcagcttgaagaacttccttcagtatttaaagacagatttcctggtaacaaattttcagtgttcatataggaatgtctttagttcaccttcttttttttttaatgtgtttttttttaaaaagctttaaaaatatttctattaaaaaattatatataataatagtatatgtttttggggtacatgtgatattctgatatatgcatacaatgcgtaatgatcaaatatggtaattaggatattcatcacctcaaatatttatcatttttttgggttgggaatattccgaatcttctagctaatttgaaatatacaataaattatttttaactatagttaccctactgtgctattaaacactagaagtcattcattctatccaactgtatttttacagtcattaactaacctctcttcaatattatccctcctgcccttgccagcctctgataaccatcataatactctctaattccacgagatcaacttttttagctcccacttaaaagtgagaacacgtgatatttgtctttctatgcttggcctatctcacttaacgtaatgacctccggttttatccatgttgctgcagatgacaggattgcattcattttatggctgaataacattttattgtgtatgtgtgtgtgtatatatatatatattttttttttttctttatccattcatcaactgatggacacttaagttgattctgtatcttggctattgtaagtagtgctgcaataaacacaggggtgtagatagctctttgctttactgatttcctttcttctgaatatatacccagcagtgggatcgctggataatatggtggatctatttttagtttattggggcacctccatactgttttccatattgactgtactaatttacattcccatcaatagtgtactagcacttccctttcttcacatcctcatcagaatcagttattctttgtcttttttataatagccattttaactgggagataatatttcattgtggttttgatatttcgattatgattagtgatgttgagcattttttcatatatctgctggccatttgtatgtctttttttgagcaatgtctattcagatcacttgcccatttttaaattgggttatttggttttttgttattgagttgaggcctttatacattctggttattaaaaccttgatgaatggatagtttgcaaatattttctcctattctgttggttgtctcttcactctgttgactgtttcctttgctgtaaagctttttaacttgatgaaatcctgtttgtccatttttgctttggctgactgtgcttttgaggtattatacagtgtcataccactcagacaaatgtcctacagcatttccccaatttcgtctagtagtttaggtcttagatttaagtctttgaatccattttcttttcttttttttttgaggcggagtctccctgtgtagcccaggctggagtgcagtggggcaatctcggctcactgcaacctccacctcccggtttcaagcagttttcccacctcagcctcctgagtagctgggattacaggcgcctgccaccatacccaactagtttttgtactttgagtagagatagggtttcaccatgttggtcaggctggtctcgaactcctggcctcaggtgatccagccgtctcggcctcccaaagtgctgggattacaggcatgagccacctcgcccagcctctttaatccattttgatttgattttagtgtatggtaagaaattgggaactggtttcattcttctgcacgtggatatccaatttttccagcaccatttattgaagagattgtcctttctctaatgtatgctcttggcatctttgtcaaaaaagagttggttgtaaatgtggggggttttgcttgtttgtttgttttggttttttttttgtttgtttgtttttgagacagagtctcattctgttgcccaggctggagtgcagtggcgtgatcttggctcattgcaacctccacctccccagttcaagcgattctcctgcctcagcctcctgagtagctgggactacaggcatgtgctatcacacctggataattgttttgtatttttagtagagacggggtttcaccgcgttagccagtatggtctcaacctcctgacgtcatgatccacctacctcagcctcccaaagcactaggattacaggcgtgagccaccacgcctggcctggatttatttctgggttctctgttctgttccattggtctatttgtctgttcttatgtcagtgccatgctgttttggttactatagctttgtagtgtattttgaagtcaggtagtaattcacctttatttctgaattacagttctgctagataaagaattctggattgacagtttttgcttttttggttttttccttatatcactttctcatatcactgcacactgagctctattgtttcaaaaagtcagctgtttatcacattgtggttcccttctacatgatgagtctttctgctcttgtggctttcaacttcttcctttgtctttagttttcaacactttgacaatgatatgtctaggtgtgattctttctgtgtttaacctagttggagttcattaagcttctaagattaataattttcgagaaattttagaactttcagacattatcttgtcaaacttttttctgcttctttctttccttctgagactttcattatgcatattttggtagacttgatcatgttccaacttctgtgaaactctgttcatttatttggtcttctttctctctttctgatgaaataatctctattgatccatattctgttttgctgaatatttctctgtcaactcaaatctgctagaatttctatttgattctgttttaaatttttatttatttattgctattttctatttggacaagtcagtgagatcatacattcctctaattctttaaatacagcttcgtttagctctttgaaaacatttacaatagttgtattgaagtctttgtgtgctaaggagaacatctgctgccacctctgagacagtttctactattctttgttttttcctcgtatatgggtcacattttcctgttttattccatgtctcataattttttcttgttgaaaactgaacacatttgatactttatattagcaactctggattctgaacccctgtgtgttttgttttgttttacgacttcctggaacaattctgtagagtttatcttccggtacagtatcttgcagtgtgaagctgctcagtttcttcgtgttttcttttttattatctgtttttatttttaagcttggccttcttggggtgagcctaacttactggtcagccaatgactgctgagaggttgtgctctcagcagtttactggttgtgtttagccagtaacattcacacccttttcctgatggatctgtacatggtttggggaatgcatttaaagtttgggcaggttacaagcctaccctggcttttactttctgcacatgcaaggcttcaccttcaactagggaagaataaagtgctaaagcccactttggtttctcctgagtttgtgtatagccttgtacaagcagtctacagatcactggggacatgagaaagcttgctaaggctcactatggtgatcctgttccctgttaaaaatttgactggtctgttgttagtctgctgcttcccctaaccagtattttatccccaagctggtgatgtcagttttccctcactgtttaccaccatgatggtatgtatttattttattatccttggacaggcatttattcctgctctccttcaaatcatgaatcagactgacagcccatgcagacttgctggatgggaggaaatgaaagctgctcctggttaaattaccacacacttccattgttctcaccaaggattagtagttcttgaataaatgcttctcaatttcttgtatatatttggtcagtttccagagtcctgaaatggttgtttgacaattttgttcagttttttaagtgcttttggggaaagggttggctgagatcttcactcggccattccagaaatcacgatactttttttttttaacaacgtactgactgtaagttagagacaaatatttgtttcacctcattgcatatgaaccaacctgaatcatcctttaaaaattatcacagtcaaatgaatttttataagtaatagtagaggcaaaataaaataaaactgaaaatgaataaacaaattttaaaaaaaacccacagatgaaatgaacccatttggaaccaacaattttaaatctagacttattaaaaaatacaaaatacaaaaggcaaattattggtacttttaatgaaagaggtcctaaacttgattctgccagtcccatgtaatttcaggtcctcaacttctataaatcttggtttccacttttacaaaatgagagacactaatttcatgcagttattctaaggaccagatgagataatgtaactacatgtattttacaaagaataactttctatgaaaatataagattatatcaaccttattttttgaaatagggatgctatgagtagttgtaaaataagccaataaatataaatataggctataaagcattatttctacctatgctaagtgatatttacctcagaatatattactataataaattagattgtaatattctaagaaaaaaagtcactatagccacataaaagcctttatgtatgtccttacaatatctggtttctacatgtcaattattttaaaatcctacgttaatatattttaaaatcttttagtagctaaaaactagagacaatcaagaaaacactcaagaatatcaagactgagtcttctgagtatgaatatttaaaaaactacatgaaagttgggcacattggtgtacacctgtaatcccacctactcaagaggctgaagtggaaggatctcttgaactcaggagagttcaagaccagcctgggcaatacagtgagaccccatctcaaaagaaaaaccaagacagaaaataaaaccaacaaacaaaaactacatgagactagagttttatgaaagcaacatttaaaaaaatagattttgcttaatcttctttaagaaataaccatgctgttttgcatatggagtggccacccatttattcctttcttttctttttttttttttgagagagtctcacattgtcacccaggctggaatgcaatggcataatcttggctcactgcagccttgacctcctgggctcaagcaatcctcccacctcagcctcccaagtagctgggaccacaggcgtgtaccaccaagccttgataatttttgtattttttgtaaagacagggtctcaccatgttgcccaggctggtctcgaactcctgagctcaaacaatccacctgccttggcttcccaaagtgctgggattacaggcatgagccactacacccagccccttcactttcttaataaacttgccttcacttaaaaaaaaaataataataataaataaccgtttttaaaacttgtcatttaaaaacttagaaaatatatctactactttaaatatctatatcttaattggcatgtcctgtttaaatgctgaatatgtaatcctattctcaggtattccaaacaactctattttagtaaactcccatctatccagaaacccaagccagaagaaactactgaaaagtttgtatgcacaatactttcaagaaaaagtcaaatgacagtacctattgagagtttattttaaaagcaaattttactagaaattcagtcctatttctgaaactatctacacaaatgtgtagcataatagcaatgtcacaaagcaatgaaagacactcaagttattaaaaattggactatagctataaaatatgcatacctttgttttttaaatataatccggatatttgatcttaagtaatttatcctaaagtaaatccttaagccaagacatagagattttattaacaaaattggtccaatatgcttatactaaaaaagaataatagagaatgaacaggaatgctagccaatcatttaaaattatattcaaagaaggctttattctaatatattaaagtattattttatatgatctagagtgaaaataggagcagggaataaagtaggtatttcagaatattcccatttttatatgaattttacaaatatcactgtgggcatatgtttatatgaatattaaaaatgtctacagcaattatctataaattatctataaaatctttctctgcttctttttgtttagctctattttctaatttttccaacaataaacatatttttgtactaaagaaaactggctaccttttatctcatttcaaaaaatgaaatttagtattcagtgcaattttaatgttaaatagaatttgccttcttaattaatctatagtaccttcccttatctaggaaggtactttaacaaaaatatttcaatatgtaactatttttgagaaatagttaatgattacattaaaataggacatgctgttcctcagtaaccaatatatttcaagtatgtgaaatttcaactatataattgaaactacaaatttacctaataatttgtccttcttcttccggagtagctggtcttaaccccagaactatgtgacacacctagggaaaaaaatggtaaatcaaagtttattaactgcataatatttcacattatctgcatgagacccatttcctaaattggaatctgaattagcaacagttttcaactcatgaattatcaattattcacttgagcaaattttaactttagccttgtggttttggggttttgtttgctttttttaaacaagccattccaatggaagctaactttcaaatctctaggtaagaagggaagagaaagggaaggaagaaaaagcgaaaggggaagacattacctcaggaacagatttcagaataattcttctgacacttgcatatgctagattttaaataaccaaaacactcagccatgtgtgagatcttggcaaataaaagcataattcaatattgtatcattaacctaacaaattaactctatcaattttaaaacacagatagaaaataaaaacaatttagcataactgtctgcttattcatatattaattgcatatattaattgtacatatgagcataaccaaatatgtgacaaagcacatacagtaaaatgtaataaaatttaggtgttgagtagattattggatgtttcctgaaaaaaactttcagcttttcagtataaaatgttggaaacatacataagcaaatataaagtatatgtttattcattatcacaaaaatagtgccactccaagtccttagtaagaatgacaaaataggaaaggcaataccaaaagtcaaaatgctatactctgtgagagctacaagatgactcagacacaaacttaagtgaccaaaatgttcatacactgattatgagataaagagtacactgaatatgttcgtgtacaaacagcatatgaactgtcaactgtacatgagcaatacattgaatgtgttcatgtactgttcatacaaaaagttcgtacactcaacatgtgattgttattttaaaaagtaacaatagtttaattaaaaaaaaaaaagcctacagaacctactactgaagatcttattttaaatgagataaaaatagttgaccaggctaggcttggtggctcatatctataatcctagcactttgggaggctgaggcgggcagatcacttgaggtcaggagtttgagaccagcctggccaacatggtgaaacctcgtctctactaaaaatacaaaaattagctgggggtggtggcacacgcctgtaatcccagctactcgggaggttgaggcaggagaatcgcttgaacctgagagatagaggttgcaatgagcccagatcccaaccactgcactccagcctgggcgacagagcaagactctgtctctaaataaataaataaataaaaaataaaaaatagttgacccattttcatgttaccaagcaattctgttgtgtttatagtggtgatctatattattttcatatatattttataaagccatcgacttgaatctatgctgaaaattataacttgtaataaagcaaataattgatttacaggcctatcagattatatatgttttaaatacataaaacttagtcattaactctcaggaagagaccaatttccatttattccaacacagacgtgttgcagacaagttattctttgtttaaaatggtagatcatgatacatataaacatactaaaccattctgaccttcacagtggtgaaaggaaaataaaataagaagaaactaaaataaccactattaaatcaagttaaatatttgcgaataactataaaaatgggaaaatataaattatctttaaaaatcagagcgagggaattagtttaactaggacaatagttaaaatttggcaagctctgtgacttagtgttcacttctggtagctttccttctttccttcccacttaatcttttttggaccttctaaagaataaaaattaggaaacagcctcataccttcaatgatctcttaaccagagagatggtatactttgaaaaacttgggctgggcgtggtggttcactcctgtaattgcagcactttgggaggctgagacagaagaactacttgagcctaggagtttaataccagcctgggcaacatagcaaggcctgtctctacaaaaaatacaaaattacccaggcgtggtggcacatgcctatagtcccagctacttgggaggctgcggaaggagaatgacctgagtctgcgcagtcaaggctgcagtgagccatgcttgcaccacagcactccagtctgcatgacagagtgagatgctgtctcaaaattaaaaataataatgataataataataaaagaaaagaaaaatgtatagctacctccttatgattcatctttctggtcatactgccttacttattaggaaggccttttatttatttattttcttttaaaaaaattctcttggtcagtcttattacaaggaagcccttttaaaaagacaataatgaagaaactagcaaattatgatggcttttgcaacttattctctatatgtctatgtactgctctataatgagttataataatctacatcccactttcctatttcccacgtcacgattttgacaaacttcagcaagcacccatctttcagacgagtaatgtagttctttttttttttttttaatatatggttttgcagcctagatacaacaactctggctactatatgatggaaaagatgtagaagtactggtactactaccctctgttgctgtcatttaccttaaacatacctggaaaaggaggttcaaaaactcattggcaagaacatttttcacactccagatctgatagtcttccagagtaagatgacccatctgaaacagagacactcatgttaggaacatcttttttttctttttttttttttttttgagacggagtctcatactgttgcctgggctggagtgcaatggcacgatcttggctcactgaaacctcggcctcctgggtgcaagcgattctcctgcctcagtctcccaagtagctgaaattacaggtgcccgccaccatgcctggctaagtttttgtgtttttcagtagaaacggggtttcactatgttggccaggctggtcttgaactcctgacctcgtgatccatccgccttggcctcccaaagtgccgggattacaggcatctgccatgatctaaatgttgactaacacagaaaagtaatttcttcctctttactttcctaactcccctacaatgcagaaggtaaactagttcaagttcgttcctgtatgttttcctaaatgcattcaatagcaaaattttacaatttgtggtaatgcaaacatatatggtttaatcatatatggttggtaaaattcactaaatatctctgaattttatcaacgcagtaagaaatactgcccattttctttaaaaggtttaggtaactaaatcaacaaagatgttctggtaacattatttgtcctcgcttccttttatgcctcaaatatattggtggcagtctgcactaataacaaggaaaatatatacacatattgttctctaaagagaaaaacattgacttgcagaatcactgaagtgtatagatcaactgtcttataatcaaacaacagacatgtgagagatttaatagaaaaatcactgggcatggtggcatgtgcctgtagtcccagctactccagaggctgaggcaagaggatcgcttgagcccaggagcatgagtccagcctgggcaactagcaagacaccatctctttgaaaaaaaaaataataaaaataaagaaaatcctccaaatcagaatagagaaataagctaaagggaaaggaagaaaaacaaaaactcatttttgttttttcaaaaaagttcacattcaaaaagtagaaggcagggagaggggtaggcaaatcactagattatgactaacactgaatcacagaatctttcttatcatgatcacttttcaaaaaattgtcctgttcacttacagcagaggaagtgctgtgataaggtttttgttttttttccacccaaatcagtacagcagaggtccttgaataatgtttcattcaatatcattttattataatgttaatgggggaaaaaatggattcccagctggggccactatctgtgtggagtttgcatattctttccatgtctgcatgaattttctccaggtactccggtttcctcccacatcccaaagacatacacgttaggttaacaggagtgtctaaattgtcccactgtagtgtggtatctgttgctgtgaggaaaggaacatcaatgcctgcaccacggcaacagaagaacttcaaaggctatgtaagatctgccaatctcccaaatcaagtatacaaaaaactggtgaagagagggtttgaattcatacttataggtgaattctggattgggccagtcaacattaatcaacttattattcctcacagatttctattctccagagtatccaggtccttcccatagaataaaaaacactgaccaacaacgtgatttcatcattctaagaaatatattgataagaacacacatgcagaacttgaaagatgttactaataatgaagaactacagaagcagaaaaccggcagctgtgacataatggagttgataacgttaccaagcaaaggaggcttgctgcctgatgagacagaagccaatactctgatgttgggtttttgagaaaagcaaaggttttcactataagccaaccaaaaaggagatgggagtccagctcaagtctgtctccctgtgcttgttttaaggcaataattttattaaaaaagccttatagggtggattctgggattggcagatgactggtagaaggagaggattggaaagtccttcggcatgcacagttatttcttcatgttacttcgtggatcacatgtgccaattggggggagtcagtatgaaacacacagtgggaattagcaagctcattctgcgtaaactctacttagccatattggttctagccaattcagccagtttttaaaatctcacagtggagagagggttagcatttcagcaagttgttatttattttattttgttttctaaaaaagacacagggtctcactctatcacccaggctggagtgcagtggtgtgatcacagctcactgcagtcccaaactcctaggttcaagggatcctccagcctcagcctcctgactacaggcacaggttaccaaaactggcttaaaaaaaagagaaaaacacagaaaaacaaggtctagttatgttgcccaggctggtcttgaactcctggccttaggcaatcctcctaccttggcctcccaaggtgctggggttacacaggtgagagccaccacacaggccagctttttggtgttttttttttccttcaatctgctattctgcaaactcaaggagttctgctggttatcagtttcttactctttggggaacagttttagtttcagcttcttactaagttgctttttttcgtagcctctatcctgtaagcccaagaatatagtcattggtttctttaactctttagggcacaatttcaataacaaaataaatggcagcttactaagagtcttcctctggcacaaatggaagaagaaaaaagggagcaagcagataagatgaagaagatggagatcaagacagagcaggtatttgagatgaaggtgagtaagtagttcaaaacctgagggactctgaagttgagctccaacggtgccatgaaatgatgcaaatgaaaaacatgaaatgatgcaaatgaaaaacatgaaatgatgcaaatgataaatgaacattacgttcacttaatgcaaataaaaaacaatttggaagcacagcaaaaagaattaagagaaaaactgttgtcagtttgaggatgagtaagcaaactgggaagctcaacaacgtattttagaacatcagaactcttcaagaaccttggcaaagatcaagaagaaagggaaggtcttttaaactctctactgaccaagagttacatattagttgccaatatgccattatgcacatcagtgtttgttggatccctttgaccaatctgcatcagccattatgatggatttaacagcgtgacaaaagtgactttgttgttgatcctgatggagattaagatgccttgaattgtagggtgttgtatacttagaaagtaacagctctaagtacctttcctacattttcttttcctttttaaaaaattaaacagatatcttcaatttaatgcaagagaacacttcgctgttttacagtcatattctggcagtttgaatgtttacaggacattccaaaatgaaatgactctggaaggttttgattgaagataaattgccataatatgaggcaaactatgcttctctatgataactataatgcaaagttccatctcatgcagcatatacaataaggtaaattagtctaacacaggtgaccctattttttgacctttccattctttaaaaatacacatgggaaaaaaccctatatgcttacagtgcacctagaactacttttttacacaatcctttaaatatatattattcttatttagtggcccctttagccagaatctcattattgcttcatttttgtaataacacttaaatttaggtattttccacatattggcccagctaaaatagaatatagcatgtttcacatggtaggaaccagcaaggaagctttcctttagctccctttacacattttatggtaagtagcaggaggaaggaggaagatgcatttacagatcacttctaggaaacactgagaagataaagaccaacctgcggtctctttagtttactagaaataagaatcatggccttttaaagagaagaagtcactatttttcactgagctgtattcatatatagcatatatgccctttttgtttgtattgtaaacaattcacgtaacaatgctgtgatgtaaaaaaacaaaaaaatgaaaaaattaaataaattgtcccagtatgagtgagtgtggatatacgtgtgagcgcgcccttcagtgggatggagtcttgtccagggttggttcctgtcttgtaccctgagctgcagggataggctctggccagccactaacctgaactggaataagcgggttggaaatgaatacaaattaccataaaataacaagtatgcaatgatcatacaaatgcatgataataaatgatatgctgagaaagtactcaatgagcctcccatatttgttattgttagtttttgaactgcaaggtggtaggaggtgttccttataattttcattttgcaaatttatcccttgatttaacccatcaccactatgactgctgctgtcactcactaattcaccaaaaactgggtaaataattatcttgtttttatcaatctttcttagatctgtttatagttcacatttatttcaaagcttaatattagaagtgcttggggtctttatttagaagtttggtgatatttttgtgactagaaatatgctgtaggaacttaactcttgtttgcctatggtaaaattagttttgttctataccctttcacttaaagttgcagtttccaagaacctaaagacaacattaagtgagtactaactgtacaagaagttaaaggcatctggaactgtaatacattatgaacaaaagaatctttgacttaagagacctgttgttcatattacaatgctatcagaaccatcaattactagataaccatccatcattagtattcctcttgcctttgaaaatgactttttggctatagcaatatggttttaaaagatacaggaataggctgggtgcggtggctcatgcctgtaatcccagcactttgggaggctgaggcaggtggatcacctgaggtcaggagttcgagagcagcctggccaacatggtgaaacctagtctctactaaaaatacaaaaaaattagctgggtgtggtggcgggtgcctgtaatcccagctactcaggaggctgaggcatgagaatcatttgaacccaggaggcggaggttgaagtgagccaaaatcacgctattacactccagcctgggtgacaagagcaagactttaaaaaaaaaaaaaaatacaggaataaatcatagcataatcataatggaatactatgcagaggataaaaagactaagttaatctatatataattttctatctagcatatgaaagatgcttagtaaacattttactaagtttatgaagtaaacatttatttactaagcatctttcatatgctagatagaaaattatatacagatttaggaaaattcagaaaaaaattattgcataatcgcttatacagtattattcaatttttaaatatagaacacacacacaatacatataaatttctcctacacttgatagtagtcagaatagtatatcttcccctctaacatccattgagaataactaaaattttaattcttaaaacaaaacaaaaaaaacccagaagaactgcaagctctgccacatcatgtatctcagtcatgaggaggcaaaagagaaacatgtcacataacttaatgaactctacgggtgaggatatgatctgataaatttcaactcattcaggagttttacactgaacagtcacgactaaaattccaggacagaaaaatgaagaatgccaacagagggagaagctatgttgaacataggctatatttcaaaatgctacttgtttatctttgaagtaataattgtcaatgattctgcactgatgacaaaattaacagctagtgtaaacccattttaattttataggactcagcatctagaacagataggaaaatcacagtgaaatatgaaaatgtaataacttctattaattttattgtttgaaaatctaaaatgctactaataaaactaaaataaaggctgtttaaaaagtacaaatgtaggccaggcacggtggctcacacttgtaatcctagcactttgggaggccaaggcgggtggatcacttaaggtcaggagtttgagaccagcctgggtaacatggcaaaacccgtctctactaaaaatacaaaaattagccaggtgtggtggtgcaagcctgtaatcccagctacttggaaggctgaggcaggagcatcacttgaacccaggacgtagaggttccagtgagccgagatcattccactgcactccagcctgggtgacagagcaagactatctcaaaaaaacaaaaataaaaacaaaaacaaaaacaaaaaaacaaaaaaaggacaaatgtaatttgatatgtgtgataaattattaatacatggtataagaaccttttatatctaacagaacaaaatataaaatgctcaagatggtaaaaagtatttttaagatgataatctgattcttttatataaccacaaatattcaaggaacaattttcaggtacactgacctcaaagatatgttaatactgtccaaaaggaaagaaacgtcatgaaaagaaataatagataccaccgtacagaatcatcatgcatacaatgatgatcaaaagcccatttgctatactgacacctgagtaataattaacacactgtaaaaacatatagagcattatgcttaaaatctagaactgtaaatggattttattttctcccaatttaatggatgttttactgactgcagttaggactactgctaagcaaggtatcatatgaactttttctaaagcaaattcactgactatatggcttatttattttgttttatgtatgtatgtatgtatttatttatttgagacagagtttcactcttgttattcaggctggagtgcaatggtgtcatcttggctcactgcaacctccgcctcccaggttcaagcaaagctcctgcgtcagcctcctgagtagctggaattacagatgcccaacaccatgcccggctaatttttgtatttttagtagagacagggtttcgccatgttggccaggctggtctcgaactcctgacctcaggtgatccgcccactgtggcctcccaaagtgctgggattacaggcgtgagccaccatgcccaacctatatgacttatttgtaaatgtcctccgtttaaatgtggccctgattttcaaaatagtgtcagctgatcacttgctctgttctacttgaatctttggaggtttctccatagtttggtataaagttcaactcctgagttttgtacccaaggcccttcaagatacgtctccaatccaggtctacagccttcaatatatgaatctgttattccagccacatcagaatatttgcagttctaggactacacaggatgttttactgtacagtcctatacagtaataatgtcttctattctacccctagttgttacctcttttaggaatcacctttcaactttttacttctgttaaccataattaactaattattaaagtgccacatcccagcagaaatcttctggactttcaaagttcaatttacatggttccctttctatcctctcaccgtaatacttggtgctaacctttttttttttccagacaagttctcattctgttgctcagcctgtagtgcagtggtgtaatcatggcacactgcagccttgacctcccaggctcaaatgatcctctcgcctcagcctcccttgtagctggaactatagacatgtgctactgtgcctggctacgttttttctttttttagagatagagtctcgttatgttacccaggctggtcgagagctcctgggctcaagtgattctcccacctcagccttccaaagtgctgggattatagatgagaactaccatgcccagcctcaacttctaacatagccctgatcacacttgtctatctttacctgtatactacaaactatccaagggtaacatctagatctcttgagccactacagagtatcattaaatagtcaacagatgaattagataaaacagagaagagttggaagtcagaaaaagaatgagtaatgttggtacaatctagtcaccagcgaatatggttaataggcttggttaaaaaacccaagttctatcccaaactattactatttcattatcatggttacatggaaatgaagcagctaaatgatcttgtttaatgttcacagaagagccagaagtagaaactccatctaacataaaaggcgacagcaaaaatacctacatacttatgaaacacttagaaaaaaggtgttcaaaattttatctctacacaaggcattttctaacagaaacttttcctggtttttgttctcatacacacgaaatagaagtcgataccttagtttctggcagagaggagaaagaaggggactgaattgtcaaagctctagcctgaaactcatttctattatttgtttctattgagaatcagttaatagggccattaacaatttcttctgaaattgtgattgaagaaagaaaaaaaactgacgttctttatttattctaaacctctatttaataacaccattgtggtgtagatcctaccaatctgcgacttggtacatgtcaatgcttcagtagaaagactccaatttatgcaaatgtgtctcatacaggtaatttattttcaatttcacagggacacatagacatcatagtaatgcaagctataggagtaaatctattatgataacattactaataaatgttaccaaactaaataagtcaaggatttttttttaatttataaagtacatgtttatttttgctattacatgcttattctggctaccactaaaggacacaggagaggtccttaccacaaccatttaaaaaaattttttaggccagcacagtggctcatacctgtaatcccagcactttgggaggctgaggcaggactgcttgagcccaggagtttgcaaccagcctgggaaacatggcgagacctggtctctacaaaaaaaaaaaaaaattagctgggcatggtggtgcacacctatagtctcagctactcgaaaggctgaggcaggattgcttgaacccaggaggtcgaggctgcagtgagccaagatcccaccactgcactctagcctaggcaacagagcaagatcctgtctccaaaaaaacaaacagacaaaaaaaaaaacaaaagaaatttcttgaaagaatagatgtactggccaggcgcagtggctcacgcctataatcccagcactttgggaggccaaggcagggagatcactggaggccaggggtttgagatcagcctggccaacataacgaaaccccatctctactctaaaaatacaaaaaaatcagccggcatggtggcacacacctgcagtcccagctactttggaggctgaggcaagaaaatcacttgaagccgggaggcagaggtggcagtgagctgagatcctgtcagtgcactccaggctgggtgacagagcaagactctgtcaaaaaaaaaaaaaaaaaaaaaaaaagagagagagaatatatgtactgccagattaagaggaaaaaaacatttccatcatctcagatatccttacggttgttcccaattaatctgcacacccctgaaatcactattccaacttctatcactatttgttagttttgcttctgtgttcttcgacttcatataaatggaatcatacagtatatattcttttttgtttgacttcttttgctcaatataaggttagccttaccacaacttagtcaaatggaagaaatacagatgataggctatagttgccaagggctctgtctacataattcttataaaatgcctagcttataataaatgttttcacatacagtttcagagttgcttaaagatggaatggctctctttggagataacttggaggtgttttacccacaggtccagataagtacttggtagggaggatgccaaagagattcaagcatgtatataagcgatacatcccaaatggagtacatgatatttttagaaaaagataaattagttctatctagactcacctttgtggtgtcatgtgcattcagtatgccttctacaatatcagagagatccatatgtaattcctttaaaaataacccaaaggagtaattagaaaacagtgaatatacttttaattttgttattcaatggctaaagtatattaagcaagatttgttttgcttttcttgtagagatggggtctccttacgttgcccaggattatctcaaactcctgggctaaagtgatcctccagccctggcttcccaaagtgcggagattccaggcaagaactactgcgcccggccttgctcaagtatttttataattaccatagattctcatatatgattaaaaattaagataactttcctatggtttcattcttattttacatagttcagtttaagattttctaagccaaactctctttccaattttgcatcttcagctataaatattttgagtagcataatgtagtaactaaaagcagtaacaaattattttatgcttttaaagaaaatgattccctccaatttcccattggaagtttatacgcaacaagacatacacaatcataacttacaggaatatcatcagtgcggttgtccttccagacttctaaaagtgcaaccaccatgtctctcagttcaaccctggagagaactccatcacggtcaacatcaaataccttgaagcaaactaatgaaaagaaactcttatggaggaaaatcatttttgtattctgaggtataatatattttactagaagttgcccttgtataattacttagtttttaaagcaagtatatgtattctggaacagttctcatctgtaataaactatattatgtcattatagtcctcagaacttgtaggacttcctgcatatcatgaatctgtatctctaaatcattattcagatataagaccctacccttcagccaaatctaaagctaaatgccttacaaactgtcaagaaagggcgaagttactgtacaataaatattacaataccttacaagtttttaggaagtaatgcaaacccctaggttaatttctaatattgaaaactgatcattgcagagttgtttcttgttcttctttttgtttgttggagatggagtctcgctctgtcgcccaggctagagtgcagtggcatgatctcagttcactgcaacctctgcctcccgagttcaagtaattctcctgcctcagcctcccgagtagctgggattacaggagcacaccacaacacccaggtaattttttttttttttttttgagatggagtctcactctgtcgcccaggctgtggtgcagtggaatgatctcaggtcactgcaacctctgcctcccgggttcaagcaattctcctgtctcagcctctgagaagctgggactatagacacgtgccaccatgcctggctaagtttttgtatttttagtagagacggggtttcactgtgttagccaggatggtctcgatctcctgaccttgtgatcagcccatctcagcctcccaaagtgctgggattacaggcgtgagccactgtgcccggccaatttttgtatttttagtagagacgggatttcaccatgttggccaggctggtctcaaactcctaacctcaagtgatccaccggccttggcctcccaaagtggtacgattacaggcatgatgcacggtgccaggccagcagagttgtttgtttgcttaaaatatcctatttacagctgggcatggtggctcacgcctgcaatcccagtactttgggaggccgaggtgggcgaatcgcgaggtcaggagctcgagaccagcctggtcaacatggtgaaatcccgtcgctactaaaaatacaaaaaattagctgggcgtagtggcgggcgcctgtaatctcagctacttgggaggctgaggcagaattgcttgaacccgggaggcggaggttgcagtgatccaagatcgtgcccctgcactccagcccaagcaacagtgcgagacttcgtctcaaaaaagaaatcctatttatatcaagaatcttaagctgatataaagacagtccacttccatgttacctttccagtataactaatgtacattcaatctttttttggcaaaaacaattttaactcttttttttttcttttttttgagatggcgtctcgctctgtcacccaggctggagtgcagttctcagcttactgcaacctccgcctcctgggttgaagcgattctcctgcctcagcctcccgagtagctgggactataggtgtccaccaccacgcccggctaacttttgtatttctagtagagacagggtttcaccatattggccaggctgatcttgaactcctgaccttgtgatccgcctgccttggcctcccaaagtgctgggattacaggtgtgagccaccgtgccaggcctttttttcttttgagacagagtcttgctgtctcccaggctggagtgcaatggcgcaatcttggctcactgcaacctccacctcccaggttcaagcaattctcctgcctcagcttctcaagtagctgggattacagatgcctgccactgcacccagttaatttttgtatttttagccgagactatgtttcgccatgttggccaggctgatcttgaactcctgacctcagatgatccacctgcctcggcctcccaaagtgttgggattacaggcgtgagcaaccatgcccggccaacaattttaactctttaatgaaattcaaacacaacatgctaacaattagaacaccagtgctttgctatttaactccaaatgaatcattctagtttaacttccattagttcatcagcaaaaaaagaaattaaaacaaaattttttaagacaacaattaactttaatggaaatgcagagctgggcatggaggctcatgtctataaccccaacactttggaaggctgaggtgggcggatcatttaaggccagaggttcgagactagcctgggcaacataacaagacactatctctatttaaaaaaaaaaaaaaaattagccaggcatggtggtacatgcctgtagtcccagctacctaggaggctaggatgggaggatccattgagcccagaagttcaaggttacagtgagctacgatcacaccactgcactgcactggactccaacttgggcaacagaacaagaccctgtctcaaaaaaaaaaaaaaaaaaaaaaagattttagcttcctcatctaagagcaaattgtaatggaaacaaccaagccagtttgaaatagtggtataacaacagggaataaaaatagagatttgaatttttagttgaaaaattatttcatataccttcataatagaattatggctattaaatcaattgagcgcatcatagtacaacagtactaaatacgataaaaatattgaacaccacacccaaaatatgcaacatttgggaagatttattttagaaagacgtggagataatgaccccagtaaatatatttgagttaggttccaattaaatgtaaatgcctgcatttttacaaatatggttaagatttaataatggaatgtatttatgcttacaaattatgctacaacattttagttaggttaaaaaagatcattttagtatttgacaaaattagttttgaccataaattttcttttgccaatgaaatattaatctgtgccagtggatggaaaatgagttatgcctcaacttatgtaagacacaaaattctaccagaaaaatatttcctaaatgtttaaaattttcaattacatcatagctgatctgattcatttatcatgaattacaaattcttcaggaaaatcaactccattgttaatagcaaatatcccaaactattccatagtaaaaaagaagaggtgattgattccttagagtgacctcagtaaaaccctaacatgagattaatatttgttaatctgacaaagttataaaaattcaagccttaatccacagataattttacattgatgaaaactgattttctctctacatagtttgcaattttttgacaatgtttaacacacttacatttttgtctttcagccaggggtcccctgcaacaggctgataacccacaggatatctccttaaaatctatgtgattgtcacgattttcatcaaaagcattaaacaaacctgtaaaataggaagagatgccataaatcacagccaagcttcctaatgttaataatgacatgtttacaaaaggaggaatgactctttcccataaactgactgaatttttttttaagtttattagtagttcctaatgtttcaggaagtacctctttcctcttggtataattataattgaaacttgtgatcatggcagaaaatacattacaatcctttagtgtttggttatgtccatctatatttatcttacatcatttttaatggctaaaatgactatttttgaagtcaataaataaaaattaaaaaccaaaaaaaggtcagaaattgcaacaattatccttacttagaaagactaagaagaaaaagggaaaaaagaaagaaaaactgaactgcttattaaatgaatactcgaagatacactatggtatcattaataagctcccataaagctctttcataaagcaaaggaagatacactatgcaacataagagaaagaaattctctactacagtgtctctttgtactgttgaatcttttatacatgaatattttaaatttcacaaagggaatttataatctaatcctgtggttttcaaacatttcgtaaaaaaaagaaatgaaacaattttgttttcaaatgaaatgatacatcaatcccaattctaaaaaggtaaaaacacaatgcactgttgttgaagtaggtagaaacccagagccctatctgccctggctcccctgacaagtacttccgaagtactctagaaatttgaagaatacagatagtatattcccagaatctaacgcagtgccctcagtttagggattagaaaactaaagctcagagaaaattacatgatttgccaaatataagttttaaaaggtgagagctggaagcagaacccaagtattcatattcaaaatatgatttttatgatgtgctcacaattatatttggactccttatttttaaaaaagtaacagcagactgggcgcagtggctcacgcctgtaatcccagcactttgggaggctgaggtgggcagatcacctgagatcggggattcaagaccagcctgaccaatatggagaaaccctgtctctactaaaaacacaaaattagccgggcatggtggcacattcctgtaatcccagctacttggggcgctgagataggagaatcgcttgaacccaggaggcagaggttgcagtgagccgagatggcgccactgcactccagcctgggcaacaagagcaaaactctgcctcaaaaaaaaaaaaaaaaaaagtaacagcactaagtttagagctagagagcacctcggagatggtctagtccaatagtttcttcatctttttttggaggggagaatacagcaatggaatcttcttatgtaaaagaaaaaaagtagaggcaccctactggaggaagagacgaggtcatgtgtggaaacatggagctctgcccattcagtggccaccacatgactccaggcactagctactaatgcaccttactggaacacagtatcacaaccactgccttggtcaaacacattttatacatgagcatgctcgggtgcagagagctaaactgatttatgcaaggttataacaggtagaatatcaggctcaagactataataataattcccatttgtttttccccactccattaaacctgcaaacatatgagaagatggtttcttagagttaaaatgtattggttacaaatatgagatgggctcaggtatgtttaccagtgaacatatgtagaaaatggaatgatccctaccttcacttagagatggacgaataggtggtgaaaccaatgggccaaatgtctctaaatcaaatcgtccagtccgggattgagccttcaataaccaatagcgtttctcaagatcaatgatgtctgattcctccactaagggtcaaatcaaaaaagattataaaacctcagaattctcttctcaggagttcagttcatcctgataatatatcttccacagatatattttagtttcacaattcaattgctaaaaaataatcacgaccaaaaacaaaactgaaatttattatatccaaaatggtaggaaaattaaaccaaaataaacaaaatgaagctttaaaacagaaaaaagaaatctacaattccccatttaagtaggctgttaaatccaacatttaaaataaaaattaagctatttcttttgggtttcccacaccacttttacctgtactgattttttttcttctttttttttttttaagagacagggttttgctctgtcactcccaagctggagtgcagtgacacgatcatagttccctacagcctcaaattcctgggctcaagccatcttcccacctcagcctcccaagtagctaggactacatgtgtacgccaccacatccagctaattttttaaaaactttttgcagagatggggtctcgctatgttggtcaggctggtcccaaactcctggtctcaagcagtcctctcacctctgcttcccaaagtgttgggattataggtgtgagccactgtgctcagccatttttgtttattttcaatctctatcttggatttaaagtttctatgtacagcttctctcctggctagactgtaaacatcataatggcaggacctatgtctgattcatcctgtcaatacaattaatgacttacacattcaatacttattgaataaatgaaaaaagtcagcactgacagagaagatggagtaggagtccctatgtgatagcaatagcaaagccatgaaagcatgaacacctgtctctcctcattcctcagaatatacatcaaaaatcgcaaataggctctaaaccattttatctgtgtttgtttttcctccaaggaactaaagtaaaatttacaaagcgtacataggacatttattctcaactaaacacaggaaccaaagtgatcctgttaaaatataaatctagaaatttcaaattctgtctataatggagtaactagcaccagacttcacctcctaccacaaattactagaaaactgtatgaaatatataaaactatttctagaaattagagaataagcagcatagaacggtgaaccttgagagagaggaaacaaataaggtgaaccctttcattaccctggattttttccccacagtcactttccagacctaaacaagggatgagtactgtaagcagagagatttcattgagttaagaagataggttggaggtaaggtagctgaaatttgcaaaacagagtactggagaggaaagagttatgccaagaaagggctccagaaatctgcacatgtgtcttactgagttttggcagaatagtaagctgtgtatacatgaagtgaatacaatgaggctgggctatgtacaaatgccgggaaatttgttttgttttgttgttgtttgagacagaatctcactctgtcgcccaggctggagtgcagtggcgtgatctcggctcactgcaacctctgccacccacctgggttcaagagattcttgtgtttcagcttcccaagtagctgggatagcaggcatgcaccagcatgcctggctaatttttgtatttttagtagagatggagtttcgccgtatcacccaggctggtctcaaactcctggcctcaagtgatctgtctgcctcggcctccgaaagtgtggggattacttacaggcatgagtcaccgcacccagcccagatgctaggaaactgtaagctaaaaaagtcctagagctcatacagggctgggagatgtctgagttgtgaccagctgaagtggaaacacattgttggacattgggagcatttgtgaactccagagggtctctacttaataaacagagaaaaactaactctagagtaaaggctactctaaacttgtcccaacaaagcttacaaacaatcctggaaaatatggtgctgatccacaagtaacttaactgcctatcaaaataaaacacaagttccttttttaaagagagacaacaatccagatgctcagatacgtaacatccacaatgtctatcatccaaagaaaacatgaaagtagtagaaaaatgtgacccaaaatcaggattaaaaattagtcaatagagggctggatgtgatggctcatgcctgtaatcccagcactttgggaggccaaggtgggtggatcacttgaggtcaggagttcgagaccagcctggccaatatggtgaaacccccatcgctactaaaaatacaaaaattagctgggcgtggtggcgggtgcctgtagtcccagctactccggaggctgaggcaggacaatcgcttgaacctaggaggtggaggctgcagtgagccgagattgcgccactgcactccagcctgggggcaacagagcgagactcagtctcaaaaaaaaaaaaaaaaaaaaaaaattagtcaatagaaaaagacctagaaataacagatgatgtaattaacaggcaaagctttaaaatgtctattgtaagtatctcaggaattaaagaaaaacatgcctatactaaggaaagaaatggcaactataaagaagtatcaactggaactactaaagatgaaaaatacaatatttgaaatttaaaaaaattccctagaggacttaacagccaattataaactagacaggaaagattagtgagcttgaaggacaggcaatagaaactatctaaatgatagcataaagaggaaaaaggctaaaaacgtattagaatcttagtgacctataagataatatcaaacatacatacaattgggatcccagaaagggataggcagaaaaatatctcaaaaaataatggctgaaaactttctaaaattcatgaaaactatattcccacagatccagaagttcaatgaaccttgtgttagaaaactcaaaaccctaacaaggcaagtcataatcaaactggtgatgaagaaaaaaatcttaaaaggagcaagatgggggaaaaacacattacaaacaaaagaactaagataataatttatctccagaaaaaaaccccagaaagcaacagggaagaagtactgaaaaagaaaacaaaattgtcaacctccaattctgtatcacgtgaaaatattcttcaaaaataaattcaaagtacagatttttttttttgacaaatgaagtgttttagcagaaccacaccaaaaggactattaaagggcattcttcagacagcaggaagaccagttaagtatctatgtaaacagaataaggctaacaatgttacttctctgcctcaaaacctttcaatacttccccatgatcctgcatggcttacacccacaactccttcagatctttactcaaatgtcacattctcagaccatccaaaccacaccaccttcaaagatactcctctatccctcttccctgctctactttactccataatacttatcaactctaatataaaatttattcatttgttttgtttattgagcatctcccttgattagaacataagcttgagggctgagtttctggtatgttttgttccctgttacagtctaacaccagaataatatcaggcacattttgagcactcaataaataagtttaatgaataaatgagaagtattggccgggcgcggtggctcacgcctgtaatcctagcactttgggaggccagggcaggcggatcacctgaggtcaggagtacaagaccagcctaggaaacatggtgaaacgccatctctactaaaaatacaaaaattagtgaggtgtggtggcgtgtgcctgtaatcccagctactcaggaggctgaggcagaagaatcgcttgaacctgggaggcagagtttacagtgagccgagattgcaccactgcactccagcctagacaacagagcaagactccatctcaaaaacaaacaaacaaaaaagaattatttgttgagctgttttatacatacatacacacacatacccccacacccctcttcaggataatgctaactgtgataaaagataacaattagtaccagacatgaccttggcatctagtaactttcatttatttatttatttttcctgttaggtcagtttagcaaagtaactcttaagttacctggaaagataagaacaaagttccctaaatttccagggccttcaaagcatttgatgtattttttttccaagacggaatctcactctgttgcccagactggagtgcagtggtgtgatcttagctcactgtaacgtctgcctcctaggttctagcgattctcctgcctcagcctcctgagtagctgggattacaggcacctgccaccatgcctggctaattttttgtatttttagtagagaccttgtctctatttaaaaaaaaaaaaaaagtatggagcaataaagataaaattttcacagaggaatatacactgtgtcatatagttttgctttttaaactaagtaactaattcactagattgtaatcgcctgatgggtcaatgtttgcaaaggtccaattactttggaatgggatctaatttttaaaatatataacggctgggcgtggtggctcacacctataatcccagaactttgggaagccgaggtaagaggattgcttaagtctaggggtttaggaccagcttgggcaacatagtgagaccctgtttcaacttttttgtaataaaataaaaaatgtaaaactcatactaaagaatgctgttttcgttttttaatgctgaagtatctacttcaaatatccagataactgaatttatttaaaaggagagagtattttaaaattttagcaatagggagaacaacaaaggaatctgatatataaattgagattcctaaataagatgtctgtctattccatttatgatgctaaaaagaaaaagaagcctctttcattcctccagagaaacactagctttttcaagttctaaactcttccaagtagtagatcagcatacaaaaaaatctaaccctgaaacaaaaggaagatagcagtcttgacgatagaaactgttcttatttctatacttctcagtattgagaatataataggtgttcaataagtacttctgattaattggtgtttacataatacagtaaattgaaacacagaaaaatcatattaactgtgattcttttttttactttgaaaactatgttaatcaatctccttaaaaaacacaatttctttgctgaagcagaaatgtggaaagacaagtaaaacatatttacaagaaaaaaatgatcagattggtcatggtcaccagtgaaaaacatcctttagtgctgacgtttaagtgtatgtgatctgttcattttctggatatagactgcacattcctcaatcaaacatttgtcaaaagcaagctaaagtagattacatatacatatatatatatatatatataaaattaccaaacattttacatgaattggcagctaaattactaggaagagggagtttaactaaccttattttcacttacagaagtttgaagcagtaatttcagtagttactctttctatttgcaatgcataagtcactatgaaaacttagtctattggctaaataagaatgaatttatcacccacctataggtataattttttctgggtcacaacagcagtataccatattcccaacattctaagtagttcttggtctgcactttgggccatcctaatcaggtctcacctcaccaaaggctccagctgcagacaacaactctttaatgccagaagtcaatcctcatcaaaaaggccaggcacatatccaaatattttcatacagtaacacatttctttaacatttttgaaaaacaacctcctctcaggagcaatgaccttctgagatctacttaaaatggctgtaagccttgcatcactaacggataagaggataatgaaggagaggcacacagatttactaggcagttcatggtctaagaatcaccaaagtcctttattccctattgacagaaggctttaacattgtaaactaaaatgtggtaagggaccataataatatacatattgttagttgaaataaatgctaaaacagataaggacaatatacatttcttgagttagctctgaaaagagaaacaatcaaaatgaattataaagtcccatcaccaaaattagaattttaactacttcagaatccagattctaccattcaaagaaatcactcagttagcaagctgaatacattatgatacattctggggaaatgccaaaaactttctttatttattggaaaacatttacaagacagaatagatatatgttttcttccaaatattgctgaattctacaaaagaatatgactattaaaaaaataacttaataatagttcctttttttttttttttttgaagagacagggtctcactctgtcacccaggagtgatcatagctcaatgtggcctcaacctcctgggctcaagtgatcctcccacctcggcctccacagtagctgggaatatacgcatgtgctaccacatccagctaattttcaaattttttgtagagacgggccttgctgtttcccaggctggccttgaactcctggactcaagtgagcctcctaccacagccttccaaagtgctgggattacaggcatgagctactgcacccagacaataaataaaaattttaaaagccacatcatattctggaaacatttagtaaaaacgtattatatgcctgacattgtactaaaaactacacatatgactgtgaacaagacaattatgtttagagatgagaagtgaaaactgatcattttcatctagtgtggaaagtacaatgaaaaaatagagagttttctgggagcacatacatgggtaggccctggaggtctcgatgtttaaagaggtacatgaagagaatctaagggttaactagggaaaggaaaaggagtgtggcagaaggaaattataagcagaggtaaaacaggatgtgtaaaagtctgaaggtaagacagatagtaataggacagaaagacaaaaaagcagttgtgttaagttttaattcaaaaacaagaaaaaggatcacctatagaaaggtttataccatggacccaagataaaaggcaaaaaacaggaaagaattttagtttccaatgacaaaacaaaaaaagtataaagataacagttgaacctggaatagcaggcatttcagtcacaacgtagacatttcaaagagaagatgacttggagctgctagactgcttggagaggactattcacgtactacagtataggggatggcatagacagatttaaaatagtgaaagtctgattaaaactaatcaattaaaactaattacattttaactttatagtctgtctctccaaactccaacactgtgtgtattatataactatggacaaaatggaaaaggaaagagtattataagaaaaaacaaaaatgactagggtttgatcattcaaagtagaatcagaggaggagagggaagaactgtactaacttatttcaaacttttaattacatagaatgtttatgctccctatacaagctttctgactcaacatcatcatcgagatgctcagcatcatcacaaacatcatatctgtcctcctgtacctttagtacaaacggctttaaagattaacttgtcattaatcctgttgactgggcacagtggctcacacctgtaatcccagcactttgggagtctgtggcaggggaggattgataccagcctgggcaacatgatgagatcccatctctacaaataatttttagaaattagccgggtgtggtgaatgcacctgtggccccagctactcaggaggctgaggcaggaggatcccttgagcctgggaggttgaggcggcattgagccataattgtaccactgcactcctgcctggggagcaagactctgtctcaaaaaaaaaaagaaaaaaaaaaccttatctatatttcacaagtaattttacaaataaaatctgaagtatttaaatagccaggcatgctggctcacacctgtaatcctatcactttgggaggctgaggcaggtagatcactagagcccaggagtttgaggccagcccgggcaacatggtaaaaccccttctctacaaaaaatacaaaacttagccaggcctggtggtgtgcgcctgtagtcccagcaagttgggaggctgaggtggggggatcacttaagcctaggaggcggaggttgcaatgagcctagatagggccactgcactccagcctgggcaacagagccagagcctgtctcaaataataataataattaataataataataataataataaaatgtttaaacagcaaattaggatagaaaaatacaatggtattgattaaaaaattagttaagatgtattaaaccataaacacttgaactttgggctaaagttctgattccacttcttaatttaaatagataaggtaataatagtttggaatttacacttcagaaaaatgtaattaccatgacaaaatctaaaatcttgggtaaattgagtaagttattattattattattattttttgagatggagtttcactcttgttacccaggctggagtgcaatggcacggtcttggctcactgcaacctccacctcctgggttcaagcgattctcctgcctcagcctcccgagtagctgggattacaggcgtccaccaccacacccagctaacttttgtatttttagtagagacggggtttcaccatgttgcccaggctggtcttgaactcctgacctcaggtaatccacccacctcagcctcccaaagtggtgggattacaggctcgggctactgcacctggccaaatcaagtaagttaattattctaagtctgtactgaatacaaatagctccacagtttcctttgtgattcacatcaaagagaacaaaatatgattaaacgtggcagtgtgttcaacttactgtgacttcaaattttactatatatttgtgtatgaaaaagtaattaaaggcatctgcatgttaacatgttatttagaagttaaaaattgtaattcctttttgtttcctagataccttggctcattacacaaatttaaatggagtcactgatgctttaaaataaatgtctacttataaatcagttaataacattccctatttttatcacaagtttccacattcctaacacattattagaacagttcaatgtaccaaatattatttgagtagaagagcctgcaaagacatcaatagtgaattgtttagccagaatcagactgagaatttataggtaatataaatcatagtcatcaaattgtaaacctaaccatgtcagaatttctctaagaaacttagcagtaattctgactttgtgataatgcttttcatagtaagactcactaagaaagtagctgcttgccagaagccagcagcaattcagttgtctgttgaataaatttgttggttctttgtttttatagattataaaataaaagtaaacaaactggtaagaaaaacactgtctttccacaaatctgggcaagttaatttttatactgatctacagccctctatttgaaaatttgcttgatcccaaaacaattattctctgaagacagaggggtaaaaaccactgacattcacaaagccaagtgttcacaaatataagaggatgcatattcattataaaacacatgctctggccgggtgcagtggctcacgcctgtaatcccagcacttcgggaggccgaggcggatggatcatgaggtcaggagttcaagagcagcctggccaatatggtgaaaccccatctctactaaaaatacaaaaaattagccaggcgcggtagcaggcgcctgtaatcccagctactcgggaggctgaggcaggagaattgctggaactcggaggatggaggttgcagtgagctgagatcatgccactgcactccagcctgggcaagagtgagactccgtctcaaaaaaaaaaaaaaatgctgtataccagacgcaggctgagtccttttattaataataacaaaaggtattacctaatttactccttgaaacagccttataaggtaaattgtatcattatccctgttttacaaaggaggaaaaagaagttcaaagaggttaaatctatttcccacagcaatagtaagtggcaggggtagtctgtgtgacacagaggttgaagaactactaaatattttatcagtgtttctcaaaatgcagttcatggtccatctacatcaaaatcaccctggaggtctgtaaagtacaaagtcctagggcccactaaatcaaaatctttgccgacagagccagtaacctgcactttcaataatttctccaaataattccaatgctcaatatagctggtaactatcaatatgccatagtagacttacggctgacttgtttttaatttggggttatttctcttacaagaaataaggataggacaaaactcaactaagatgccagcaaataagaatgttataaataactgagaaaacagcataatatttcttcaggcttttaccacacagtactgatttatttcaatgactaccacggaaatcaatgcgcacattgtaagagcagttaaaatcattacatgtatttaaagcaaactgactcttcatgtgcctaaactgaatgctaatcaatgttctatatctgatatcatttagctaaccaaaagttttagaaggaagaccttagaactttgcaactttcaacagttctttaagtgtgtaagtatcataattcatttccccctaaaaacatagtatactctttttttttattgagacggggtctcgctctattgccagactggagtgcagtggtgcaatctcggctcactgcaacctctgcctcccaggttcaagctattctcctgcctcagcgtccaaggtagctgggactacaggcacatgccactacacccggctaatttttgtacttttagtagagacagggtttcctcatgttggccaggatggtcttgatctcttgacctcgtgatccacccatctcggcctcccaaagtgctgggattacaggcatgagccaccgcacccagccaaacatagtctacttttatgagaacatccccatgctatgaagttgttaaaccttatttaaacatgatgatttatcttggtccttctccccttggtatggctttagccttacagtcctaagaggacacatcccttctgctcactctggaggcaatcaaatgtttaaatcaagacttagaatgtacactttaagaggctgaaaaattttcaatccagttcaatccaacaaaatgcatttcgtccactaaactaagaaaaactcaaaggaataggacctgagccatattcccaaggggcttgcaacttgtgggggtaaacaaaatcatttccaacagacttagagatagggcaaaaagcaaattaattgcttcaattgaaatataaagtgttgcagaaatgcaaatagtaaaataaattaactcaaagagaaatggacaagcatgacagaaaaggcagcatctgaattgggctttgatgacaaacaatcatctcaattgtcaagggctgaaagatgaagtacattcttaaatgaaggaagattaggagtgatgtatatagtgtagctataatataaaagttcatggtgtggtcacggtatattgaccagtgctctgtagttgaggcaaagaacacacgtgaggagaaatgagcatgggaaattaagtcaaggataggaaactaagagactctgaagccatgctaaggaatttaaacaaaggtttctaagcagagaagtgaagtaattaaaagaaatttaatgtcaatttaatgtgaattaaaaatacatttaaaaaattgtccttcatcctttcgtatcattgagaggaagtaaaataagaaagataagaaacttataatgatggcaccaagaaagaaagatgcaagaaatatgtctgagttaagatggatagaatctaatatgaagcttgacaaggaaaagtcaaaggttagtcaagttagacactggaattaaaaatactatcaaccaggatataaaacacagaaggaagaacaagtttgcctttttttttttttaatacctttaggtggatcatggcagggaaagatgaattcactttagatataagatttaggtgctagaaagtataaccaagaggcatttattaaaatgaatctgaggtttcagaaatacctcaagagcagaaaagttcatctaggtatcacctacaaagataggaaggataggtgaagcatggaaatggctgtgatgaagcaaagaatgtacatcatccgagaacaaactagagcgaagggctgatccactggaaataacttttattttaaaagtaggtggtaaaaggggaacagtaaaactcgtaagaaataagaagaatattaggaaactacaatgtttcaaaagccaaaggagaagagagtttgaagaaaactgattggtcaacagtgttaaaatgctgcagagatgttaggaggtacatgaaactaaaaagaaaacaatcattaggaattagaaggtcattattgtaggtgaaacaatcaatgtacaggaatatttgtttcaaataattcaagattttttcttttctttttttttttttttttgagaccaagtctcgccctgtcgcccaggctggagtgtagtggcatgatcttggctcactgcaacccccgcctcccaggttcaagtgattctcctgcctctgcctcccaagtagctgggactacaggggtctgccaccatggttggctaatttttgtattttttttttttagtagagacaggggtttcaccatattgaccaggctggtctcgaactcctaaccttgtgatccgcccgccttggcctcccaaagtgctgggattacaggcatgagccaccacgcccagcctaattcaagatttcttaaggcaaaagtatttttaacttttagatactactaaaaatccaaaaaaagatgattttcaaataaaacggagccatttttaacatattgaaaattatttgactgattaaataaatttgttttctctaataatacagtgttttcaaaaacagtaaataagcagcttctgctttcaaagtaattttttaatcaactgacaaagctccttgaccaaattttttaggttcctctaagctcacttctactaagtttcattcttggttcccttcctgtcattggtctatcctagaccagttttagataagaatccagcaatagtcattcccctcaccttggactgctttagcaagaatcccctacctttgatgtctcctctttgtaatttttctatccactgaccacctcaccttaatccttggctataaatccccacttgtcgttgttatattgagagctgagcttatctctctcccctactgcaatacccttaattgcagtagtcttgaataatgtcttcctcacagttttaacaaatatcagaataattttttctttaacacaacaaggcatttaaggaaagcagtcacactcttttcgatattaacagaaaactaatttaccatacaatcacaagtaaaagtgaaagttcaacagaatatccatatgagtaacaatataaatattaaggtaagttagagtttacacagtgagtataaaaaggttccctcaatattttaagcaaaataattttttaaaaggctttcctatttaaaacaaagataagggcactgaaaagtagtagaatcaagcttactgcccattcatgccagaacttaccagtcagaacttttaataataacagaatgaaaatgggagaaagtagctggtgtgtaatctgtagtcaagttatatgtcatataaagtaatggatacaaatagcacttgacacccaaattcctctattcagtcaacaaatacttattcaggcttggcccaagattggaaagataggataatactgcagaccccctctgccggaaaggatcctatgagttaggagacatgacatgtacaaataagcagaatgctataagtagttataatacaaagatgaataggataaattaattcaaaaagggtacaagtaaggtgttatcagagttcagaggaatgagagataatttctgataagaaggcaagaaaaggtttcatgaaaaagagggtatgtgatttaagtcttcatggatgattattaggatttaacacgtagaagaaaaagagaaggcattttagtgatagaaagaagcataagaaaaagcagcccaggcacagtggctcacgcctgtaatcccagcactttgagaggccaaggcaggtggatcacctgaggtcaggagttcaagaccagcctggccaacacagtgaagccccgtctctaataaaaatacaaaaattagctggcatggtagtgcatgcctgtaatcacagctacttgggaggctaaggcaagagaatcacttgaatccaggaggcggaggctgcagtgagctgagatcacatcactgcactccagcccaggcaaaagagtgagacagtgtgtccaaaaaaaaaaaaaaaaggaaaagcagagtgtattaacagttttctgtatccaatggaaagaagaacagtagaaattaacacttaggcctgtgtagtgaattgaatactgtctcccaaacattcatgattatctggaacctcagaatatggccttatttggaaatagggtctttgcggatgtaatgaattaaggatcttgaggtaaaattatcctggatttagcctgggccctgaatccaaagaggaaaggacacagaaacacacagagaaggccatgtgaagacagaggcaaagaatgggagatgctgccacaaaccaaggaatgcttggggtcaccaaaaaatggaagaggcaaggaataattcttttctagggactgaggcagagcaggaggcaccttttgaggggccgaggggcctaggggtccctgcatgcatggaaataaaggatactcctgagttccttcaagtgaaactctaggcatctatctagccagccctgagaaataagtaatgtgttaagccagaaagtaatagtagcctaaaagaagatgtttgatttccctatagcaactaaagataacatcttaatatgtgtccctgagttgtcattcagaagcacagaccccctccctcaccaagaactcccactgagctgatcagaccttagaccacaggggaactaaagactcaatgctcaccatccttctttgttctaaatttcttcccagcctgggtgtggtggctcatgccagtaatcctagcactttgggaggctgaggcgggtggatcacttgaggtcaggagtttgaaaccagcctggccaacatggtgaaaccccttctctgataaaaatacaaaaaatttagctgcacatggtggcaggcacctataatcccagctactcaggaggctgaggcagaagaatcgcttgaacctgggaggtggaggttgcagtgagccgagatcgcgccactgcactccagcctgggcgacacagcaatacttcgtctcaaattaattaattaattaatttcttcctgaagggcctggagggagtcacacccgtgagccagttaacgttcttttctgctgacctcaaatttttaaaagatggttctcttccttaaccaattgcaaatcagaaaatttttaaatctgtctacctatctatgacctacttgtaagctcccctttcaagatatctggcccttttaggccaaaaccaatgagtatcctccatgtattgatttacgatttttgcctgtagcttctatattcctgaaagttacccttgcctttaaaaacccttacccatgagccttggggaggttgggctttgagcatttacctggtcctctttgcttaatgccctataaatgtcttcctttctactgctacagaaactctggtgtagatatgtgatttttactgagccaggtaagcagacccaattgcgattctataacaggacttcagagggagcacagccctataaacatcttgatttcagctgctaaaactgagtaaatgtctcatttcagtttatgaattgtggtaatttgttacagcaaccctaggaaactaatatagcttcattaaggacaattcacagaggcctatattttccatgcccagcatttctttttattacattttgaaaaaaacaaaacactgacaaaaaaaaaatttctcaggccgggcatggtggctcacgcctataattccagcacttcgggaggccgaggcgtgtggatcacgaggtcaggaaatcgagaccatcctggctaacatggtgaaaccctgactctactaaaaatacaaaaaaattagccaggcatggtggtgggcgcctgtagtcccagctactcgggaggctgaggcaggagaatggcgtgaacccgggaggtggagattgcagtgagccgagatcacaccactgtactcgaggctgggcaacagagggagacttcgtctcaaaaaaaaaaaaaaaaaaaaaaaaaaagtcttggctgggcacagtgactcacaactgtaatcgtgactcaagactcaggactttgggaaactgaggtgggaggattacttgagcccaagagttcaagaccagcataggcaatatagacccctgcagtctctacaaaagataaaaaaattagccaggcatggtggcgagtgcctgtagtcccagctgcttgggaggatgaggtgagaggactgcttgagcccaggaagttgagactgccgtaagccacgatggtgccactgcactccagcctgggacagaatttaaataaatttctcctttataagcatattctcatattaccagccaattatatatataaaaaaaggcaaacagaaaacaatgaaatgtcattacttacaatgtgtgactccagccagagtttggtagaaagtaggagtatcactatcatcagtgagggtaacatacacacctccagatagaagccatcgagagaaagtaaaagcatctttgtttagaaaaagccaatttctaaacttttcatagtttaccttttcaccctaaaattaaaacaagaaaacataagtttagtcaaattttaaggtatcttacttggaacctgcacaacctgaaatttgcaattagttggcaattacctttctgctgtctacaaaggaaggattatctaataacactgcagggtgtatatacatatttggaaatcaaacttttcaaaaatacttgtgcttcataacttctacttgcataaaatctgtatgttaactacaaattatttcatcaattcagtaaagcagtacactgccaataagccagattttgtttgctaagtatatcccaaaaccagtaaactgcattttgttttttgtttttgtttgtttgtttgagacggagtctcactttgtcgcccaggctggagtgcagtggcgcgatctcggctcactgcaagctctgcctcccgggttcacgccattctcctgcctcagcctcctgagtagctgggactacaggcacccaccaccacgcccggctaattttttgtattttttagtaaagatgaggtttcaccgtgttagccaggatggtcttgatctcctgaccttgtgatctgcccgcctcggcctcccaaagtgctgggattacaggcatgagccaccgtgcccggccatctgcatttctttaaacatttaataaatccaatttttcacttgccttatccctcttctttagcactcttcaatctgcctgagttactatatcttaattaaatctgtatggaattaaaatactctttaaatttcatttgtgaattaaaaacaactatccaggtgtcctcctagagtagacattcaggatcccagaaggcatcactgaaaacatgtatgtacacagagaacaaaaagaagcaagttgatttctgtttctttgctttctttccaggtatttttcttgataaatctctggagaaaagtatccaggctgaaaaagagcatcatatggttgttcacgccaatccctttgcttggaagacaagagatcctaggtttagtgggagccaggtatttctaagcagaaaaagggagaagcaattcacaaggaaatacaatgaagctacaacctgaactatttgatcaggaaaaaaaagaaagaaatacattgaataatgacagtcaagattggagcagctctaatcctaatagacatgctaaagaatacgaataattagttacctaaaagaaatatggtagaaacatatctacattgtttagtagcatcccattaagtgaggcgatacttttagcccggtactttcagaacatttaacgtgactgcaatccaagcaatcaagacattgacagtcttgtttttctgaatggaagaatatggtgtgaaagtggatcatacaaattgggtcattcttgtcataactaaatcagagtcaacaggcccggggtagaaagcattcacgatacattgctctcgaaatgtaattctctgtaagtccagctgctgagatgacttgctgcaactaattttgcccaccaccatcgcccaccaactgaagtttgccagctccctaaagctttactaataccaatgaactttctctcaggaccatatgtaacactcccatttttagaaaactcccaaccttctctttgttctttggacatattgaagatcacccagtcttcatgtatgccctatacatttttattttgacattgacaatgacattcagacatgttgcagggacatatgagtacactgccaacatgtttagagatgagagttcctacccatattctttctgtatcccatgtttagtctagaaagaagcttagtataaattctacaagctgatgcacatttttacacacattaacatctctgacattgggataagtcttaaaatcaatagcatcctttaattgtaatttcttagtggttgcgatattgttaaatatatatttggtcttcatctctttttctggcatgcaactcctaaaattcttgtaatctccaaagtgataaatgactctgcatgctaatgaatggaccccacagctgggtggggggctgctagatagcctcaggatgggggctggccactgggaaaaaaaaaaagaaaaccacaatgattaacctctagggagggaggggagagggcttaaagttgagctgattaccaatggtcaatgatttaatcaatcatgatcgctagcgaagatgtctaggggtcagttttgtggaactaatccctcaagctgtgggatctgatgctatctccaggtagacccttctaccaccttcatacagagctaataccaaatgtttacaatgtcctaagaactgctctaaatatttcaaatactaatttaatcttcaaaacactctctacagaagacactattattatccccattttatcatgagaaaaccaagacaccaaaaggttaaggaatttgcctactgttatacagtggaagaaagaggactgaactcaggtagtccaggctccaaagttagcacactgcctgtctaagtgaaatacaaagtaatctctgaaattcacttgcccattgggaatcattccacataactggtagaccaaaaattatacagtcaaatctgattttttatgtttctgagtcatggatctcttctaaaaagagaagaatagcataaaatataaatttccattttaagagtcaacaacctaaaataagtcagtgagaaaaaaacttcatacaacacctaggtagattcctttataacttcatctgtcaaggctaataataaagcacaagatagaaaaagctgagacccatatcacttaaatctaagcactaggtccttatattttagctaaagtgcttctctctctgtgtgtgtatgtgtgtgtgtgtgtgtgtgtgtgtgtgtgtgtgtataaacacaaaaacaacacaaagcattgttattgaaggtctgaattaacctattctaatataaatacttggatagcaatgttctacatgcaatcatcgacacactactcagatattacagcaggcaaataaatcaaatagttgaatcaaataccaatagcccatttacaatgttggttttataccaactagaggtatctaatagttcaaatagccatatacatgagcttcacatttctttgatcttttctcctctaaagatcttattaaaaacaccaccaactcaggcattaactaccacagtcttatgatgtctttattgtagtaacttcctcttcccataattgaaaatttaagcattccactcttcctatcaccatttcctcttatgagtacatttcatctagtatcctacaccagcaattttttaattccacaggacctacaccaatgacctacctgcagatcaccaaatttaatgatcacttctcagtgatcaaaggtcaactcactagaccttccagggtatttgacatagttgagttctccttccttcttgaaacattgtcctcagttggcttccaggacactattctcttttattaatcctcttttcttgcaggctatttcttagtggtctgttttgagtcctcttcatctctccaaactctaaacactggatgacaggactcattcttccaacctgttttctatctaaacttactcctagatgatctcatcctcacctgtaagccaacaacaaatcctttactcctcaacaacagatttatatatcaaaaatcacatctgacaactccacttgagtgtctaataggattctcaagtgtaattacaactttcttgatatccaaccccctaacctgcttctccattactcttagccatctcagttagtggtaattccattcatttactgaatcaggctaaatactaatcatcttccccctactcattctgtcacatagtccataatcaatacgagaaaaaattctaggccaactctacctttgaaataaatgcagaatctgaaaacttctcactacctcactgctacaccatgttctaaatgactgattaaatcactgaccattggtaatcatgaccctcatgcctggattattcagatacctcaattggactcagttcagcctacttcccacataagatccaaagtgatcatgtgtgtaaaaaaaaaaaaaaagcctcatattttgttactcctctactcaaaaccttccagtggtttctatctcactcagggtaaaagtcaaaggactcacgctgtcctataggacaatatataatcatttcctaccactcccttgttcacaccattccaactaaattggcctttttattgttccttggacatacaagtacacccccacctcaaggcctttgctatattctcttgatgaaaagtggtcctccagatatcttcatggttttctttctcacttgctataaattatttactcaaatcttagttatctgatagacctaagcattctatataaaataacaagattcagattttctctattaccaccttcttcctttattctactttattttcccctatagcactaattatcagctaatacatgtgcctgctattgtgtttaagtttttagagtactgggtagccaaccacccttagtttccatctacaaaaatgagaatgtctgcataaaccgtattaaaatgaaaaaatatcatacttcctgaaaaagaaaagagtattaatgttttggacatctatgtcaaaaatccaatcagtcaagtttgctagattatctttttttcttacaagcaaattttattatgggggaaaaaaacaaacaaatcatagctcagttcgtcctgaagtagtaaattactatcacagcaacttccagtcaatatgtcagaaccaaaaacacaggaagcacatccttttgcacctgacacttggaaatgctggataaaacgttagcaccataaccaccgccaaaaactgcatgctaggctcaaaagcaagaaagagatatcaccaggtgctatcaacacaggagatattcaaaaccagagtggtaagaaactaatgataggcagtccaaagatatatcagaaccagatacatgcaaaggctgaaatatggacaatcaatgtctatacagtcaggaaggcagagctaactccccaaataaaacaaagaacaatggaggactgtcatactggtgaaatggaattgtgtcaaaaagccacccaaaagaaaatgggcagcactgagtgctgcatgaaagaatcagaacttctaaagggatttttactctacaatcactaaggacttgtcacatactagcagacctctgaaaagaaaaataaaataattctctctgttaaagatatactttttctattgctgaattttctattgtttaatttttctataaagacacaatgaaaatatattatttttgaaaacagaaaaaatgactttccccaccctctggtagagtcggggtcttgctacattgtccaggctggtcttgaactcctgggctcaagagatcttctcacctgggtcacccaaagtacttggattacaggtgtgagccaccttgcctggcccaaagatgacaattttttaacacaaatatttcactatgcaaatcaactaggtgaaataaatgacaaaataggctttgataaaacaggtcacagatggctcaaggctaatgaatgaatgatatccgtgatgaaaagcaaagacactacaacatgagcactgtttcaggttcctgcaggagtgtgtgtgtgtgtgtgtgtgtgtgtattactgtgttagtgtgagtatatagaattgtgtttcattatactctaagtatgaatagttgcctttacagtagaattgaaaattttcagatttacaaatgtaacagtaatgagagtcatgcaatagcacataaatggaaacatcaataaatataaaaatgccaagagtaatctgcacataaacatctgtttgtcatacttaaaacttattacacaactaagagttaatactttgtcaatgaaaagggataaaatgtaaatctttaactatacctctgagaaacacttcctgagtgtatctgggactttaccatccaccacgtggagcattctttccatttcttcccgtataacatagttcccagattcacttgaaaaaagactaaaaatgtctaagaaaaagaaagatagaataaattaatcttaacaaagaccaaatatacgttggtggaagtagggagaaaagacaaagctacaataactgagtgattactagggccaagcaccttataaatatagtttattccttaaaataatccagcaacaaaaatttaaaacagcagtgtagtatcttttcaaacatgccaaatttgcaaaaatctttaggtattacaatacaaagtgttagcaaagactaggagaaacaggacctcttatacactgttaataggagcacaaattattgcaaccattttcatgagtaatttggcaaaatctagtaaaggtcaagagacattccagaaactccacttccatctttgaaaaactctgaaacctgcgtacaaaatacaagatgttcactgaaatactgtttgtaagagcaaaacttcgaaaaaaaaaaaagataaatgtctgtcaacaagagaacaggtaaaatgagatacacacaatgaaatactacatagaagttaaaatatgtgtttcaagatggataaatatcaaaagatataatattcagaggaaaagcaaatgacaaaatcatctgtatagtacagtagtacccccttatccatggttttgctttccaaggtttcagtcacctgtggttaacagaggtccaaaaatattaaatggaaatttccagaaatgaacaattcataaactttaaattgcacactgttctgagtaacgtgataaaatctcttgcctccctctttatcccacctgggacctgaatgatcctgttgtccagtgtatccacatgctactcgcctgttagtcacttagtggccattttggttatcagacttacagatcacaagaagggtgagtacaggaagatattttaacagagagagtgaccagattcacataaaacttttattatagtatattgttataatattactattttattattgttaatatcttactgtgcctaatttttaaattaatctttatcatagatacatatgtataggaagaaacggtatatatagggtttgggactatctatggtttcagacatccactgggagggtcttggaacagatctgtgcagataaggggggaactaatgtgtaccatttatttaaaactttaaacctgcaaagtagttgacaatgtttaaggacacataaacatgttgtataaaaaccagcatgagaaaaaaatcaccaaattcatgaaagtggtaacctctgtagagggaagaacagaatgggatcatgaagggatacaaagaaaacctcaccttagttttaatatttttaaaaaatcaaatcagggacatatgatacaatgttaagaaatagttaagctaggtggaggtacgtattagatatatgtttgaaatattgttgttataggctgaactttatccccctaaagatatactgaagtcctaaccttgaagtccctgtgtatgtgagattatctggaaacagagtctttgtagatataatcaagttaagatgaggtcattagggtgggacccaatataatatgactggtgcccttataagaagaaaagcacaaacagaaaaataaagccatgtgtaagaaaggcagggattagaacgatatagctgcaggccaaggaaccccaaggattgtcagtcatcctagaagcaacagagaagaaagaattttcccctacaggtttcagagaaagcatggccctgctgacactttgattttggacttctagccttcagaactatgagacggtaaatatctgttgttctaagctacccagtttgtggtgctttgttatggcagccctagaaaactaatacaatcacattttaaaaaatgaagaaactttaaaaatatgtgtttgtgacttaaaaaattgttaccagttgtacctcagtatctgtaggggattagttacagaacccccaaggacaccaaaatctgcaggtgctcaagcctcatataaaatggcatggtattttgtacataaaaactaaaaaagaaaatcctaagcaccccaaccaactgaacagactccctgtcttggccaaggggaccccagaaaatccttaaaaacagatactggtcatgaggggatgggcagtcagacacatctcattatatccaatcccttttgcagtttagagatgcaacaactaaccagcattaaaaataaagatcagaagactgacagactctttgtggcagaaaaatcccaaattgtaaacaaaacctaagctatgccaggcaaggcattaagtcatgtacccctacacttaaagaataaactgccaggtatggtggctcatattggtaatcccagcaccttgggatgccaagacgagagaatcatttgaggccaggagttcgagaccagcctgggcaacatagcgagacccctatctctacaaaaaatttaaaaattagctgggcattgtggtacgtgcctctagtcccagctactcagaaggctgaaacaggaggatcacttgagcccaggagttcaaggctgcagtgagctatcttgccactgtactgcagactgggagacagaataaaaccctgtctcaatcaatcaatcaataaactatgttctaactgctacaatgtttttccttttctttttttttttttctttttgagacagagtcttgccctgtcgcccaggttggagtgcagtggcgcaatctcggctcactgcaacctccacctcctggattcaagcaattctcctgtctcagcctccctagtagctgggattacagtcacacgcccagctaatttttgtatttttagtagagacggggtttcaccatattagtcaggctggtctcaaactcctgacctcaggtgatccacatgcctcagcctcccaaagtgctgggattacaggtgtgagccatcacaacccacctcaaaatatcatggcatgagccaccgtgcctggccatttttctttttctctagcagttattgaataagcactggccttgagataagcaatattgaaaacagttgcagctcattcaccaccaaatgctaacctactgattcctgttccacaagccgtaactacagctttgactggacaagagagctatttcagtagctatcaacaagttagtggtctcctgataagaagaccactgaccatggactggttctggctggtttacagaggctgctcacttgactgccttgctgtccttgtttcaccttttgacttatagggcctaactgtaatgcatttaaatattaagtctccaccccaaagtaaacatcgggcctaactgtaatgcatttaaatattaagtttccaccccaaagtaaacatgggacacatataacagtatgcatgtgtcaggaaccacttcatgaatattcatggcccctccgataagctgttgaatatgtacaactggccaacctcttcagcataaatctctgttctattctcccttgcacagtacctgtttggggtatctgctggaggctatgtttctcagcctgtcaaaatggccaacttgcaggctataaccctttataagaaataaagtttcttttccaaatttatagatatcataatttttttcagttgacacatataacctatccacatcctcccatatattttaaatcatcattaggttatttataatacctaaaacaatgtgaatactatgtaaatagttgttatagtgtattgtttcttatttgtattattttttttgctgtactgttaccttaagctcctagccttaaaaagatccccctgcctcagcctcccaaataactaggattacaggcatgcactaccatacctgtcctgtatttttaattattgctgcctggggccaatttatatttctgctggtgaagaaatgctaatttgcaaaaatcaggatcacaattatattccaatacataaaactgggtttatggatacattcattatcttgattatggtaatggtttactgggcatatacacgtgtcaaaacatatacaaatgtgtaactaagtatgctagctcatgtttgtaatcctagcactttggaagacagaggcagaaggatcagttgaggccagcagttagagtccagcctgggcaacctagcaagaccctatctctacaaaaacaaaataaagaaaataaattagctaggcatggtggcatgcacctatagtcctagctacttgggaggttgaggtaggtggatcacttgagcccaggagttaagggctgcagtgagctatgtgccactgtgccactatactctagcctgggctacagagtaaggctctctcctctgtcccctatcccctccaaaaacaaaaacaaaaccacgtatcaaaatatatactttatatatgtgcatattattgtatgacaattatacctcaataaaacttttcttaaaaatgatctctttgtccattttgtgctgctataataaaataccacagatctagcaacttattataatgaacagagatttatttcttacaattcgggaggctaagaagtccaaggtcaaggcacctgcatccggcaaaaggaccttcttgctcttccatcatcccatagcggaaagcagaagagcaagagaacacatgcaagagggagagagaaggaggctgaattcttcctttataaggatggcactcctgtgataagaagctcactcctgagataacagcattcattcattcatgggtgtggacccctcatgatctaatcatctcttaaaggtcccacctctcaacactgttgcactggggattaagtttccacacatgaactttgggtaacgtgttcaaaccatagcaagaattaaaaataatggtctagattcaagaataggaggggattctgagaaatttagaagcagtctcagggcagcagcttagtctgttgaggctgctgtaacaaaataccataaactgggtgcttataaataacagatttatttctcacagttctagaggctgggaagtacaccatcaattcggtgtctggtgaaggaccacttcctagttcatagacagccaccttctcattgtatcctcacacaggggaaaatataaagggtctctctggggcctcttttattagggcacttaatctcactcataagatacttatgattaaccctcatgacctaatcacctcccacaggccccatcccctaataccatcaccttggtggttaggatttcaatatatgaattttgagggagacacaaatattcagaccatagtaggcagattagaaaaggaagaaggaagagagaaagacccagcatatggtgttcaagaataaaagcaaaggaattttgggtacaaaatgttacattctgtgtaatataaacagctgccatacttcccctgggaaatcttcaataaaatatgcagggcttatgaatgcttttggtaaggcagatctgtctttggggagttcaaagaaaagaatgaggggacagaagaccttataaataattaaatgaatgaactttttaaaagtaaataaatctatatcccacgaaacagacggacactaagcaactaagattatcttccctttcacatttagcaggggaaatggtgtcctctcattatagcatttccctgatcagcaggatttaaaggtaatgaataaggtgccactcttttctctgcttagataattcacctaataaaattaatttctgaagttaaaagtaaaacattaaaaaaattaaaccttttacaaataacgtatataaaatgttatcaggtaagtaaactttggttttgtttgtgaaacaaatagactactatgtctatgtcatcagaattttaaaaaataagttctattgagacataattcacatcccataaaattcacccttttaaaataaacatttcagtgatttttaaagtatatttataaggttgtgcaactgtcactcctatgtaattccagaacattttcgccaacccaaaaggaaaccctgtacccattagcagttgttctccatttccctctcacctgatacctccagcaaccactaatctatcattttctgccactgtagatttgcctaatcttgaaatttcatataaatggaatcataatatatggcctattgggactgacatctatcactaagcaaaatgttttcaagttcatccatactgtagcatgaatcagtactttattcctttttataccagaataatttccagcatgtggatatatcatgttttgtttatccatttaccagctggtggacattagggttgtttccattttctattatgaacaatgatgctatgactatttctgtacaagtttttttgtgtgtgtgtggtaaacatatgtattaaattttcttgggtacaaacttaggagtggaattgctgggacacacagtaacaacgtttaacaatttgaggagccaccaggctggtttccaaagttgctgcactactttatactcccatcagcaatgtatgatgtgggttacaatttttccacatcttcctcaacacttattatcaggctttttacttttagccactctagtaggtgtgaagtagtatctcactgtaattttaatttatatttctctaatgactaattatgttgcacattttttaggtgtttatttaccacttgtatatcttctttgggaaaatgtcaattcaaatcctctacctgtcatcagaattttgagataaattattctgtacatagacgaattatttttgagataataaaagtacttacattttgctttctcttcatctttgcctcttgtaaggaggacaagtccaactattaaattattgaagtgcagccctttggatgttccaccaaaagaacagtaaatcacctggaaaaagatgataaagccaaccttaggaggcatttcagttgttgaggaatctgaggcagctatcatctttaacaaattttatctccacctccacaacaggccctggtaaattttagtgaaatcatgttaagtttctccctcttcttcctcttttggaccttattattgcactcagcctagaatagactgtgactactgtaaaatacgtacagatggtcctcagcttgatttttcaactttacaatggtgtgaaagtgatacacattcagtagaaaccatacagtactccataaattacataagatatttaacactttattataaaatctgatttgcactagatgattttgcccaactgaaggctaatgtaagtgttctgagcacatatatataaatattttgtttgtttatttatttatttatttatttatttatttatttatttgagatggagttttgctcctgtcgcccaggctggagtgcaatggcgtcatcttggctcactgcaacctccacctcccagttcaagcaattctcctgcctcagtctcccaagtagctgggattacaggccacttgggattacatgtgccaccatgccaggctaactttgtatttttagtagagatggcatttcaccatgttggccaggctggtctcgaactcctggcctcaaatgatctgcccaccttggcctcccaaagtgccggcattataggcatgagccaccgcgcctggcctgagcacatttaaaacagtctaggctaagctctgatgtttggtaggttaggtgtatgaaatgccttttcaactcacaatattcccaacttacaatgggtttatcgggctgtaatcccaggtaagtagaggagtatctgcatattacagacccacacaactgaattatttattctttctcttgggagtccttatcaaggtccaagagtacaaaggtcctccaatagccacaataatgtgataagaattttgtgcaattacacaacttccttcaaacctgggaaaacttacgcacattactttgattggaaaaaaagatactctctaactgaatgttcagaaattcaaagagactcaaaaaaatattttttaacactctcagaaataagtattatagtaatcagaaataaagaagaaaaactatgcataggaaagggacaacagaaatcacaataaattcactcattcaacagttctttgttgagtgcctactatctgccaggcaaagtttttgtcaataaaaatgcatgattaaacaataattcgagaagttagtcaatatgaaaactgaaaatatatattagtcaccaaattatatttataaatatatttaataacacctgacaactgatgtcaaaaactatctatctctagtgccagtgataactcaacccagcaaaaactagccaaaggaaatagctacagaacattaaaagtattttttaaaaaaccaaataaacagaactaatacactttgtaaaataactatttttagttgccccatctcccactcccaactagaagaaaataacagggaaaaacaaaaacaaaaacacctttatccctggggaagggcaggaaaacataatggccccagaccttacagatcccctatcactgggaagaaggaagatcaatgtaaaagtgtcacccctaatatccagggacacagcacctgcctaaaactgagacagaaataggactacagagaatgtctttgaggtgtgataacaaatagaaggtaacatcaaaagttgaaggtagagcaaacattagaaaaaacctctaagaaagagccctaacccctaaaaaaaaaaaagtaaccctagaatggaaattgaagtctctatagcacttagggtaaccatagcaacaagaccaaaattaagctaaactatagactatattgactcaacttcccaagctgaaggaagatactacttggctcagtctcttctgtcctatatgaagcacttatgtttcaaccataaattttaagtcacagaaagaaggaaaaacccaatatattgtcagagacgaaggaaaaatatgctaatggagtttgaagaatgctttggaatggctcaagaataaactcaacagagttgcataagagattatccaaaacgaaacaaaagggggaaaatgtgaggagagcgggcaggggaaggtagacagaacagaaaacccaagagctgtgagatcatatcaatgatgtaacattcaagtaatcctgatatcctacaaaaaaaagagaatggggcaaaataaatatctgaggagataaggttggggattttcaaaatgaatagacacaaaaccacagatattaagaagttcagagaacaagcagaatagatcacacctataatcccaaaaaccaactagacaaatcacattgaaacttctcaaaaccaaagataaaaagaaaatgtttaaggcagccagaagaaaaacaaaattacattaaaaaaaacccaaaaattatagctggattatcatcaaaaattatgtaagccagaaatcaatggtgtgaaatattgaaagcactaaaggaaaaaaactcaaccataagttctgtacctggtgaaaatatctttcaaaaagaaaagatattttgcttccctttatttttttattttttttttttacggaaacaaaaacagagaagtcattaccagcaaaaaggggtacaagaaagtacctcaggctggaggaaatattatgccattagagatacatgtacctccataaagaaataagaatactggaaatggcataaatgaaggtaaatataaaagcatttttcttatttttaatcactgtgaaagattaactagcagtctacatcagtaagagaagaaatgtaaagtgtctttatagaatatgtaaaagtaaaacacgtaacaatagcacagaggatgggagaaaggaattggaagtatactgttgtatagtacacataaatgttgtctatacaccattaaatggtttattataccaattcacatgtggtatatctcatctttaaactgccagtcaccaggaaattacgtgaccttagtaatctagtgtttaagcctaacattgacctcattaataaactcttatttttataataaaagcaatagctaatatttaaatgcttgttatgtggcattttactactgtaagttatttaccagtattaagcctttagatgactccacaaggaatactggtatcctcattttagggctgggggaaaccagagcccaaagagattaagtaacttgtccaaagtcatacatcaatgaagcagcagagtcagaattttaacctaggaaagacaggcttctgaaactgaatttttaaccaacttttagttctatagtacaattaatatgttagtctgttttgcattgctataaaggaatacctgaggctgggtaatttttataaagaaaagaggtttttttggctcacggttctgcagcctgtataagcatggcaccagcatctgctcagcttctcatgaggcctcagaaagctttcacttgtgacagaaagtgaagggggagcagagaacaagcatgtcacatggtgagagaggaagcatgagagagaggaggaagtaccaggctcctttaaacaaccagctctttcatgaactaatagagtgacagcgcactcattactgtggggaaagcacccaggcactcgtggggatctgcccccatgatccaaacacctcccacgaggccccacctccaacattggggatcacatttcaatataagatttggaggggacaaatatccaaactatatcaattatatacattcatttctagttaatttgtctagaattatatgaaagacatcatcagcaagacatacatcattttggtgaaatctcctgaagattaaacaaagaaatttcaaatggtaacaaattcaatttataaacactgagtttttggcatccctttccattcactgtatcttgataatccagtctcttcacttttgacaatttcactgactttaatacaaagagtaaagcagtgagggtaaaattaaggaagaaattttgagtaaggtatgactttcagttttgcaagtacttgtaaaatgtaacagattttgtatggaataaatttgtttggaatatactgctacctccctatcgctcccaaaatacaagtacagcaataacctagaatcatccagttcatttgacaaatgattaagaggaagcccccaaaaatcaccatttcctaagttctaggatgtacatattttccgcctttaatcaatgtttcagaaagcagtatgcatctaacacctctaatgtctaagtacccttttttcactcaaaaagaaaaaaaaaggaaaaaaaagaacaactatttaaatggtcaccttataataggcagtcctttaacatttagagaatattaagtgccacactcattactaattagctttcattttcggatttagaagacggagtgtgaataggatagcaaggatgctggcagtccagggtggtcttgatgtcattttttgaaaagcacttaataaaggtaaagtgttatttatataatttgttgcaagacttttgttttaaaatccctataataattttctggccgggcgcagtggctcatgcctgtaatcccagcactttggaaagccgaggggggtggatcatttgaggtcaggagttcgagagctgcctggccaatgtggtaaaaccttgtctctactaaaaatacaaaaattagctgggcgttgtggtgggcgcctataatcccagctacttgagaggctgaggcaggagaatcacttgaacccggaaggcagaggttacaatgagccaagattgcaccactgcactccagcctgggcaacagagcaagactccgtctcgaaagaaaaaaaaaatgtctttagctattaaaaaaggaaaggccagagcaatcaggcaagagaaagaaataaagggtctccaaattggaaaggaggtcgtcaaattagccttgttaccagataacatgaccttatatttagaaaaacctaaagattccaccaaaaaactgttagaactgataaattgaggaaagattgcaggatagaaaatcaaaatacaaaaatcaatacaatttatatacatcaacagtaaacaatctaaaaaagaaatcccaagtgagtaatccaagttaaaatagctacaaagaatataaaatacctaggaatcagtttagccagagatgtgaaagatctataaaaggaaaactataaaatactgatgaaagaaattgaagaggacacacacacaaaatggaaaggtattctatgttcatggattggaataattaattttttttcctttctttttttttttttcttttgagacagtcttgctgtgtcacccaggctggagtgcagtggctcgatcttggctctctgcaaactcaacctcccaggttcaagcaattctcctgcctcagcctcccgagtagctgggattacaggcacgcaccacaatacccagctaattttttgtatttttagtagagatggggtttcactatgatggccaggctggtcttgaactcctggcctcaagtgatctgcctgccttggtctcccaaagtgctgggattacaggcgtgagccaccacacccagccagaattcattttgttgaaatgacaatactatccacagcaatttacaaattcgatgcaatccctatcaaaatatcaatgacattcttcatagagaaagaaaaagagaatcctaaaacatacatggaacctcaaaagaccccaaatagccaaaaaatcctgagcaaataacaaaactggcagcatcatactacctgacttcaaacttactaaaaacctatagtaaccacaacagcatggtactgatacaggagcagggcagggaagtgctgggtagagaaaggcaggtgcctggctagggctccaccctcaggcctgtgcccacagacctaggtgaggacaggcactcctgccttggtgcccaaatgttgcattttccaagaccaccctggcctgccacgcccccaaggtgtgcctataaaaatcccaagaccccagcaagcagagacatacaattggctggacgttgagaggaacatatcagcagaagaacgcacaagtggctggacgtccagaggaacacatcagttgaagagcacactgacaggcactggcagatgccggcaggccactgaccagcagaacgatgcggagttagggtggggcagtcagaggaaagtacggccgctgagaggcccgactccaggggaaaactgccttcccaatccccttctggctcaccgtccagctgctgagagctacttctaccattcagtaaaatcttgcactcattctccaagcccacatgtgatccgacttttctggtacatcaaggcaagaatccgggatacagaaaacccttgcgataatgcagagggtctaattgagctgataaatacaagccacctagagacagcaaaactaaaagagcacacattaacacaaacgcactggggcttcaggagctgtaaacagtcacccctagatgctgcccctggtgtcagagacccataacctgcccatctgtatgtttccctaaaggtttgaacagcagggcactgaagaagggagccacacccccatcacacaccctgtgagggggacaagggaacctttccagtatcaatactggcataaaagcagacacacagaccaatggacgacagagaacccagatataaatccaaaaatttacaatccactcatcttcacgaaaaagcacaaagaaaatacaatgggggaaagaacagtcttttcaataaatggtgctgagaaaactggataactatacgcagaaaaataaaactaggctggatgcggtggctcatgtctggaatcccagcactttgggaggctgaggcaagtggatcacttgaggtcaggagttcaagaccagcctggccaacatggcaaaaccctgtctctactaaaagtacaaaaattagctgagcgtggtggcgcatgcctgtaatcccagctactcaggaggctgagacaggagaattgctctaaacccaggaggcggaggttgcagtgagccgagactgtgccactgcactctagcctggtgacagagcaagactctgtctcaaaataaaaaacaagaaactagactcctcatctttcagcatacacaaaaaatcaaatcaaaatggactgaagacctaaatccaaaccctgaaactatgaaactactagaaaaaaacattgggggaaatgctccaggagattgttctggggaaaaaaatttttgtgtaatacttcaaaagggcaaataacaaaagcaaaaatagacaaatgggatttgatcaagctaaaaacttctgctcagcaaaggcaacaatcaataaaattaagagacaacctgtagaatgggagaaaatatttgcaaaatacccatcttacaagggattaataatcagactgtataaggagctcaaacaacttactagcaaaaaaacaaaacaaaaacaaacccacaaaaaattacatttctaaatggggaaattcccagcattttgggaggctgacacaggcggataacttgagctcaggagttcgagaccagcctgggcaacatggcagaaacccctgtctctacaaaaaatacaaaaattagctgggtgtggtggcacgcacttgtaatcacagttactcgggaggctgaggtgggagaatcacctgagtccaggaggccgatgttgcagtgggccaagactgcactactgctctccagtgtgggcaatgaagtgagacactttctaaaaaaaataaagaaatgggcaaatgatctgaaatcttcaaaagaagacatataaatgaccaacaggtacatgaaaaaatgttcagcatcactaatcatcagagaaaggcaaatcaatactataatgagttaaaatctcacccattatatcgaaaagcaggcagactgggcacagtggcacatacctgtaatcccagcaccttcagaggccaaggcaggtggatcacaaggtcaggagttcaagaccagcctgggcaacatggtgaaaccccgcctctactaaaaatataaaaattagccgggcatggtggcatgtgcctgtaatccaagctagtcggaagtctgaggcaggagaactgtttgaacctgggaggtggaggttgcagtgagccgagattgtgccactgcactccagcctgggtgacagagcaagactccatcaaggaaaaaaaaaagaaagaaaaagaaaagaaaagcaggcaataacaaatgctggtgaggatgtggagaaagggaaactcttgtacaccatttgcaggaatgtaaactagtacagccattgtgtaaattagaacagctatggctgttcctcaaaagactaaaaatagaattaccatatgatccagcaaattgctactgggtatatatccaaaagaaaggaaatcaatgtatcaaaaagatacctgtactaatgtttattgcagcaccattcataatagtcgaagtttggaattaacctaagtgcccatcaacagatgaatggataaagaaaatgtggtatatacacacaatggaacattattcagccagaaaaaagaggctgggtgcggtggttcacgcctgtaatcccagcactttgggaggctgaggtgggcagatcatgaggcgaagagattaagaccttcctgtccaatgaggcaaaactctgtctctactaaaaatacaaaaattagctgggcgtggtggcacgcgcctatagtcccagctacttgggaggctgaggcaggagaatcacttgaacccgggaggcggaggttgcagtgagccaagatcgacccactgcactccagcctggggacaaagcaagattccatccaaaaaaaaaagaaatgctgtcatttgcagcaacatgttaagtgaaataaatcaagcaggccaggtgtggtggttcacgcctgtaatcctagcactttgggaggccaaggcaagaggatcacttgagctcaagagtttgaaaccaacctgggcaacatggtgagacctcatcactaccaaaaaacaaaaataagccaagcacagagagacaaatatcacatgttctcactcatatgtaggagctaaaaaaagtagatctcatgaagatgagagtagattggtggttaccagaggataggaagagtagtggggaggaggggggaatacagataagttgattaatgggcccaaatacatggtttgacagaagaaataaaatgtagtgttagtaaggtgattataataatctagtgtacatttcaaaataactagaaaaaattaattcaaatgtttctagcataaaggacaaacatttaaggtaatgaatattccaagtacactgagattttatatttccaaattatgaatggattagtgatcacatgtaccccccaaaaaatgtatctattatgcaaccctaaaggaaaagaaaaacactcttaaacattttgtagccatgactatccagtcaaagacttaatacactgttatactaatatataaaattgatgtatgtggtaatgatctcactagcctcctttcagacaatgatgtcatcccagtaaataatatgattaactctgaagagagggaaatttgtctgtattgtcaaagaaaaagacttataacataccaaaaacctacctcttgtctaacagttaagaggtcaaaaaagggtagatgtaggccgggcacagtggctcacgcctgtaatcccaacactttgggaggccgaggatggtggatcacctgagatcagaagttagaaaccagcctggccaacatggtgaaaccctgtctctactaaaaatacaaaaaaattagccagttgtggtggcaggcacttgtaatcccagctactcaggaggctgaggcagaagaatcccttaaacccaggaggcgcacgttgcagtgagctgagactgcaccattgcactccagcctgggcaacaagagcgaaattccacctcaaacaaaacaaaaaaaaacggtagatatgtgtaggtctccagagtttagaaacagttgtagcatgtttcaactgctgctttctggtcctggtcattccactgtctaatggatataaggtaaagggttatcccacagttccttaggggaaatagttaagtgacagatactgttttatcatggcttttagagtcagaaaggcctgacattgaagccaggctttattaatataccaactatgtggtcttaagcaaatcacttaactttctgggccttagttgcagtccatgacacatatgttgaagcaatgtgccaagtcgtctcattccaggacctaagctggaaagcagcccctgggtgggaaatactatctcaggacagaaggcggaaaccagagtttgaagtcactttgttaactagtaagaattcagcactgatgagctcataacttttgcttgaaaatatttttccagagtaaactctagtacaccaatctaactgcttgattaattcatcaacagaaccaaattaatgttttcaaattttcattttatataattctcatgaggatcaatacttttccatttgttgttgttgttgttgtcgttgtcgttgttgttgagacagggtctcattctattgcccaggctgtagtgcagtggcataaccacagctcatcgcagccttgacctcccaggctcaagtgatcctcccaagagtccttgggagtctgaggactcccaagtagctgagcgcacaggaacatgccatcacaccttgctaattttttcatttttttgtaaagatgggatcttactatgttgcccaggctaaaaaatttatcctgactgacacagagttaaaaaggaaagtatacataagttaaaaaggcaaaaaatatatacctttccaaagaacttgatgtcaccaacctacatgcttaaaagccatctttaggtaatgacaaagatgaaacatgaattcacaaaataagtcatgctgtatgttggtgagcttcgaagaataactcaaacacaacataaggcccatggtatatgaatacattaagtactcatttgcataaaacatacttactactgataaaatttcaaatgttaacatttaatgcaagctctgtggctgggcacggtggctcatgcctgtaatcccagatcccagcactttaggaggctaagctgggtggatcacctgaggtcaggagtttgaaaccagcctggccaacatggtgaaacctcgtctctactaaaaatacaaaaattagccagtcatggtggcaggcacctgtaatcccagctactcgggaggctgagtaaggagaatcgcttgaacctgggaggcagaggttgcagtgagccaagatcgcaccactgcattccagcctgggtgacagagtgagactctgtctcaaaaaataaaataaagtaagattaaaaaaatgcaagctctgttcctatatgtgtgtgttttgaaaaacttttccttctaaaactaaaaattatgtgtgttcacattactgtttctttagtgcagagtccaatagaacaaaatgtttcttttcttcaaatgtgtttcataatactaaccatgtctttcctggaagtaaatatcataaggtagagtcatgcttagctccaaaaaaaataaagggccccttgaaattctgaataaataacaacatacaaatgcaaagtataaattcctgaagtctaagcaaagaacatatactgaggaaacaactaccagggattagaaagcggaatagtacccaaagctcacattgagtttatcagtcaagcagaagagacacctcattgaacatccagagcattgaggagagaccccaagagttaatccttagtattagaggtaaaccatacttatactaaagtctattcaagactcaccattacaaagctttaacacaggattaaagaggattagctaatctgtgattaagtgtgtgctagaataaaatccaacattttaaaaacaaagacaacaaattcaggtacttataacataaggtttacaatgtttactagatatcaaaaagttactagatacaagaaacagaaaattgtaaccaatcaccagaaaattatgaggcaaaagaatgacagagatgataaaaactggtatacaagaagtttaaaacagctattataaatatgctcaagaatttaaacaaaaataaaaacatggaaatagaaactatattttaaaaagaaacatgaaactttagagtgaaaaatataatatctgaactaaaaagttattgtgtggctttttttttttttttttttttttttgagacagggtctttctctgttgttgcccaggctggagaatacagtggcattgatcttggctcactgcaacctctgcctcccgggctcaagcaatcgtcccacctcagcctcccaagtagctggggctacaggtgtataccactactcctggctaattttgagtattttctgtaaaggaagggtttcaccatgttgcccaggctggtcttgaactcctgggctccagtgatccacttgcttaggcctcccaaagtgctgggattacaggggtgagtcactgtgcctggccctgtgtagccttaaaagcatattaaacactactgaataaaagagcagtgaacttgaagaaacaggaataggaactatccaatctgaagtacggtgaagaaaaagagctagaactgggggtggggggaggaaaggagagaaaataatcagtctcagtaacctgtgaaaaaccaccaagctttttacatacctgtacttagagacaaagaaaagggaagggtgaacagaaacatatttgaagaacagtactgaaacaccttccaaatttgatgataaacctaccaatccaaaatgctcaaagaaactcatatgtaagataaacaaaaccaaacaaaggtatataatacattcctgaaaaatagtaatacagaaaatcttgaaagcactgagagggaaaaaggtataaagtgaaacaaaaataagaataatcactgacttgtaatcagaaacaatgcaagccacaagacaacagaagaaacaattttactatactgaaagaagaaaaaaacagcctaggattatatatccaacaacaaaatgaccactcaattttaaacagggcaaatgacttaaataaaaagatgcaatgtctttagtcattagggaaatgcaaatcaaaaccacaatgacataccacttcacacctacaagaacggctataataaaatgaatgaggccgggtgtggtggctcacgcctgtaatcctagcactttgggaggccgaggtgggcggaatgcctgagctcaggagttcaaaaccagcctgggcaacacagtgaaaccccatctctacttaaaatacaaaaaaattagccaggcgtggcggtgtgcgcctgtagtcccagctactcaggaggctgaggcaggagaatggcttgaacccggaaggcagaggttgcagtgagccgagatcacgccactgcactccacactccagcctgggcgacagagtgagactccatctcaaaaaataaaaataaataaaataaaatgaataaataacaagaatgtaaaaaaacccctgcaacatctatacactgttgatggaaatgtaaaagggtacagctgttctggaaaacagcctggtggttcttcaaaaaggtaaacatagaattaccatatgacctgacaattctgttccaaaaagaattgaaaacagagattcaaacagatacttgtatgccaatattcacagcagcattattgacaatagaagaaaggtggaaacaacccataaaaagatgaaaaaaatgtggtatatacacacagtgaagtattatttagccataaaaaagaatgggtgtttgcagccattacagctctctagcacctttagctcactgagctcctgcagagggagctgaagaataagtaaataagtctctatagcatggcctgtacaaaacagattgcctgcaaactgaccatggtaaagcacccacgaagtaactagccacaaaagccattcacaagagtgcaccctctattggaggggtaaagaaacgtcatcattacaggcctggtctggtactctgtgacactgaaccttatcacaagtccactgaacttctgattcacaaacctcccttccagcatctgatatgggacttcaaaacagatctgtgcttccagaatacagttactggtgctctgcaggaggcaaatgatggttggcctttttgaagacatcaaccactctgctatccatgccaaacatgtaacaattatgccaaaagacattcagctaccttgccgcatatatggagcacatgcttaagaatatgctatgatgagtaacatttcattctcaaaaaaaaaaaaaaattctctcttccctgttactggtagttctgaaccctagatttttttttccccatggggtgaaaagctacctaagtaaatgactgcaagtgggaaaatggggaacggaaatcaggtatagggagtttttctattttcatgttgcaagagaatttttaatataaatatgggtatgtaaagcattaatgcaagtcaaagtgcttcagtgagcacgtttccgcagttcaactagtaagtacgtatttttaatattgtctctcttctgtgttgttcctgtaactacaaaaaaaggaatgggccaggcacggtggctcatgcctgtaatctcaacactttgggaggctgagacagggggagcacttgaggtcaggagttcgaaaccagactggccaacatggtgaaatcccgtctctactaaaaatacaaaaatgagtcgggtgtggtggtgggcgcctgtagtcccagctactcgggtggctgaggcaggataattgcttcagcctgggaggtggaggttgcagtgagcagaaatcacactattgcactccagcctgggcaaaagagcgagactttgactcataaaaacaaacaaacaaacaaaggaatgaagttctgatatacgctacaaatggatgaaccttgaaaacattatgctaagtgaaataagccagacacaaaatggcaaatattgtatgattccactatatgaaatatttagaacaagcaaattcatagaagtagaaagtagactggaggttatcaggggctggggaggaagaagaatgggaaataattgcttaacaggtacagtatttctgtttggtgtgatgaaagaaaaattatttttccatgtaaatttgagaaaaatggagtgatgaaaaatgttgaaagtagataggcatggtgattgggcaacattgtgaatgtaattaatactactgaaatgttcacttaaaggtgattaaaatgggccaggcacagtggctcatgcctataaccccagcactttgggaggccaaggcacaaggatcacttgagcccaggagtttgagaccagcctgggcaacatagtgagacctcatctctattaaaaaaacttaaaaataagccaggcatggtgatgcatgcctgtagtaccagcgactcgggaggctgagctgggaggattacttgagccaaggaggtcaaggctacagtgaaccatgatcaagccactgcactccagcctgggtgacagagtgagaccctgtctaaaaaaaaaaaaaaaaaagttaaaatggttaattttatgttataaatcccaatactttgggaggccaatgcaggaagatcgcttaatgccaggagtttgagaccagcctgggcaaaatagcgagaccctcaccgctacaaaatattcaagaattagctaggtgtagtgccatgcacccatagttccagctacacaggaggctaaagagggaggattgcttgggcctgggagattgaggtaccactgcattccagcctgggcaacacagtgagaccagcctggccaaaatggtaaaaacccgtctctactaaaaatacaaaattatctgtgcatggtggcatgcgcctatagtcccagctacctgggaggctgaggcaggagaatcactggaacccaggaggcagagattgcagtaagctgagatggtgccactgcactccagcctcggcgacagagccagactccgtctcaagaaaacagaaaacaaacaaacaaaaaaaacagccaactggcttttgttattgatcatgactgttaaacatttttaaaatcagtggtacaaattgtgacatagaaagcatgtgtatcagttttgtaaatgacaaagttggtagggatggctaaaaggttaacagaattaaatcaaattcatcttaggctgtgacactaggctaaaagcaacaaaattaaatttaatctatttaaactgcagtttccttataaactcagcatatataaagatatagaagaagatcaagcttgaaatttttagccaacaaagtgatgaccttttggcttgtttaggctaatacaattttatgctgaatggtagtgattaaagaattatatattctcctgttcactaatctaattccatctagagaacagcatgggattaaccattatgcatattaactgtggttaagaagcagcagggaaaaggacttgttcacatctctagaagggaaagttccagtttcccaattcaaacagctgaactctacctccatgaagcagaggatttccagttgagactcaagtaaagacaacaaaaatttcaggattatgaaactgtgacaaaatcattagtggcttttagctgcacccccacctccaaacccagaaaacaaggctgggactaggtcaggtgaatttacagaattgttttactgcccccaaacttaaatggagtagaaccaaaacacaaaaattttactgaattaatgatatcctacatcattttcaagctggtgtgctacatcaatttataacatccaacatttagcaagatacaaaaacggtaaccttgtaagagaaatgttagagaaggatgtgagtgaaaaattgaccactttttaaaataagttattcgttacaatgggatattattcagtcataaaaaggaatgaagttctgatacatgttacaacatgaatgaactttgaaaacattatgctaagtgaaataagccagctacaaaaggacacatattatatgataccacttacgtaaagtaatttgaatcggcaaattcataaagactaaaagttgactgcgtgttatgagggtttaggggaaggggttgggagcattaatggttaatgagccgagtttctgtttgggatgatgaaaaggttttagaaaaagatagtggtgatggctgcaaaatattgtgaatgtagttagtgtctgtgaactgtacactttaaaatggttaaaatggcaaatattatgttttatatattttgccacaacaaaaattttaaaacatagtaaaatacagggactcagattaagaatattcagataataaatacgagtataataaacacttagatagaaagtacttctgtgagctaggcacagtagctcttgccacaacaaaaattttaaaacatagtaaaatacagggactcagattaagaatattcagataataaatacgagtataataaacacttagatagaaagtacttctgcgagctaggcacagtagctcatgcctgtaatcccagcactctgggaggctgaggcgggcagattgcttgagcccaggagtttgagaccagcctgggcaacatggtgaaaccccatctctaccaaaaaaatataaaaattaggcagaagtggtggtgcgcacctgtagtcccaactactcaagtggctgaggtaggaggattgcttgagcccaggaggcagaggttgcagtgagccaagatagcgccactgcactccagcctggatgacagagtgagaccccatctcaaaaataaaaataaaaataatacaaaatttaaaaatacactataacaactattcacgtagtatttacattgcaataggtattataaataatctagagatgatttaaagtatacgggggtgaggggtgtgtgcatactaaacattttatttaagggacttgagcatttgcagattttggtatcctggtgggcctagaatcaatccccaacagacaccaaggatgactgcgtaagtatcttcaatatcagcattggaactcttctctcacacaatatattttcagggagtaatctgttgaaaatcccaaactgttatttaaacaaactaccaagaatacaattaagtcctcatttaacatcatggataggttcttggaaactgcaacttcaaatgacaccaggtagaatgaaaccaattttaccacaggttaattgatataaacaagagtcaagttcctgaggtatgtttctggtcacaaaaatatcaccaaacttctaaataaataccccaaaacatttctaatattaaacattgaaataaatgtaagctgtacatacatttgaggaaaattaataaaaacaagtaagataaattactatatctacccaattattactgttcagtgtcacaggtaatcagagcctatgtcagcagctcaagggcaccatcccatcacacggcacactcacgcagacatccacactcactcagactgggacaacttagacatgccaagtcatcaaacgtgcacaccgttgggatgagggaagaaaccggggtacctggagaaaacccacacagacatgtgggggagcatgcaaaccacacagtggccctggccagaaattgatgtttttttcatcaacattataatgaaaaacaacaccgaatgagtgatgagatgacattatttgaggatgtgctgcacacagttatataaacctatttagtaatcaaggaagagtttccctaataaataaaaatattttcagaaagggtaataagcaataaaactagcattttagaacatgtacaatgattaccagaattccaggcaaatgtcacatgcaggttccaggaactaggacctggagatctttgaagccattatttagcctacaaccctctccagagtagctatggtcctaggagaatgggacaaattctcattgctttttttcccccatctctgtcctcttacctcctacagcttggctccggatacagacgcagtagcacaaagtatatggcacagtagtataactaaaaaccctaactctctaaccagaggactgaaaatcggagatccagggaaatagaaagtaaaaagaatattgaggagaggaagaagctcaggaaagttgtcttttgaactcctgggtatacctcccagctgtatatgaatggatataagcctaaattgcttatcaaagtctaagaattaaaattcagcatagaccaaaacccaggtcccagtctagccactgggtggtacacatatgggacagatacaaataccactgcaaagactctaaaaacttaactgacattggaactacaaccaacgtaagactggtgggaactgatgccctgagcccatcattatcaaggatctgataaaacaaatataccgacatctccaaagcaacaatcagaatctcataacacaatattccaaatgtccagaatataatctgaaatcactcagcacataaagaaccaggaaattatcatctcaattaggaaacgacaatcaatcaacaggtaccatcaatcaggtgagacacattggatatagacaaaggctttagaacagctattacaaaaattcccaaagaaatgagggcaaacattcttgaaatgaatggaaacacaacagtttaaacatagtaacagaaaatacagaagaccaaatgaaaattttacaatgaaaaatacagtaacaacaacaaaaaaattttaagccacttccctaaatctatcaattggaaatctggaaagacaagcttctcttttaacagtgaccattcgttgtgatggtcaactctattaatcattaacacctcagtggtaactattttaatcagatggcttttttttttttttagccctagtgatactaactgaaaaagaaattgtctttgacctttgccacaactttagtcatccctttgcaataaagtgcccatagctggcattcaatgactgttgagaaaacttaataaacagaaataaatagaataaaagcatgtctttatgagacagagaaaaaaagttaagtaaaatgtgacaactagatacaaaataggcccactgttttataagatgtgtttaacataagactcaacatgctggttctttaaagtgaactgagtaggtaactctataggccaaacttttttttaaggttattttaagatgagttcttgccatgttgcccaggcttgcctcgaactcctaggctcaagggatcctcccacctcagcctcctcagtagctgggactacacgaacataccactatgcctggctccctaaatcatatttaagtgtttaagatattgttcttaaatcaatgaatttaataagcattatactaaaagccaagaaaaagcatggcatatacaacttgaaatccacatggatttcattttggctctctgtattagtaaatcttcacaaaaatttatttatacaaaattaataacttaattggtattttaaaaatagattgtaataaatagatgtaatttcagaaaagttctgatgtttgttctacacactaaaaaaatagaatttcaaaaaagggtcaagattagaaaacacgaaaattaactgactcagggttcaaaaaaaggagatagtccctgggttctagacttggagttacatttatagaaccaccatataaaatataaataccatatatcaacattaaatttggttaacaattactttaacattttaaagatatttattgctaaaaaacagaaaactttaacattcttcaaagcactaaaatggattgagccaattatgccaattacaaatttccatatacatatacaccacatgaatgtataaatattttcatttcagatttactagtccatttgatcaagaaatttgaacatctggagatcaggaaaatgcaaatcaaaaccacaatgagacacaacttcatacccactaggacagctataataaaaaacacagattaattaaactccaaggatatagggaaattggaacccacatatactattggtagaaatgtaaaatgggcagccactttggaaaatagtctggcagttcctcaaaaagttaaatgaagagttccatatgacccagaaattccatgcaaggtatatatccaaagaaatggaaatatatatccacgcaaaggtatacaaatgttcacagcagcattatttataataacaaaaaagtggaaataacccaaatattcattaactgatgaaataaacaaaatgttatatatatatgcatacaatgaaatattattcaacaataaaaaggaataaaggactgatacatgttttcaagattcatctaagaggccaatcacagaaaatcatgatttcatttatatgaaattactagaatagtgaaatctatatagacagaaagtagattagtatattagttggccaaaggctgtgagaggagaggatgaagaaaacagggatgactgttaaagtaaggtttctttttggggagatgaaactgtggtaatgggtacacaactctatgaacatagtaaaagccactgaattgtatactttaaatgtgtgaatagtgtgacatgtaaattatagctcaataaaagcttttaagaaaaacaaaacactatttcttttaaagcaaagaactggtgtatgtaacaaagttggttaaacacactttgctgaatactgctcctataaggctttttatatctcacctaaaatttctgaaagtcaaatataacaagaaagaaggaagactggaaaagtagttcaagataaaccttcatgtgaagtattatatgctttactgttttctaaaaagcgtcaaaacatctctacagcttctgccatttggaaattaagaaattcttcttcaaagatggaatactagtaaagttgccacccatgcataaaatagcttaagcaatcagcagtgcaaactataaaatgattttttaaaagcataaaccaggccaggtgcagtagctcatgcctgtaaaaccagcactttggaaggccaaggtaagaagattgcttgaggccaggagttcaagaccaacctgggcaacacagtgagaccttgtctctacaaaaacatttttaaaagttagctgggcatggtggtgcacttgtggtcccagctacttgggaggctaaagcgggaagattggttgaacccaggagttcgaggttgcaatcagctatgattgcaccactgcactccaccctgggtgacacagcaagaccgtgtttcaaatatatatatatatatatattttaattaaaaactatttttaaaactaaccagattctagaaaaaagtgaaaacacattttcaaaaatgctactaacttgattcgaaaaagactatctcagtgtcttccacatgaggcaggagaagaaaccaattcttaaacctcatttcccctacccctgagatcaatgggttcctatagatagaattttatatttatattttcccattgttattaatggtaattaacaacatgtaaatggtatggttaaaagtcaccctcatttcacctttgatactttatcttttctttgtttcaatgcattgataccttatcttgatgtctcacattacttcaacagaaataaaaaatacattttgaaaagcaatgtaaaaaattaaactttgtctcagaaaattatactaaaaaactgttataggccaggcatggtggctcacatctgtaatcccagcattttgggaggctgaggcccacagattatctgaggtcgggagttcgagaccagcctgaccaacacggagaaaaccccctctctactaaaaatacaaaattagccaggtgtggtggcgcatgcctgtaatcccagctactcaggaggctgaggcaggaaaatggcttgaaccaaggaggcagaatttgcggtgagccgagatcatgccattgcaccccagtctgggcaacaagagcgaaactccatctcaaaaaaaacaaaaaactgttggaaggtttaaaatgatttagctacaggtgttatgaaaactaagcataggaaaaaataaggcaatttttaaaacaaggaaaaacaaaatattgaataagaaagaaacctagctgccacggtggctcacacttgtaatcccagcattttgggagcctgaggagggcagatcacttgaagtcagcagttcgagaatagcctggccaacatggtgaaaccctgtctctacaaaaaatacaaaaattacccaggtgtggcagtgtgcacctgtaatcccagctacttggaaggctgaggtgggagggagaatctcttgaacctgggaggcagaggttgcagtgagccaaggttgtgccactgcacttcagcctgggtgacagcgcaagaccctgtctcaaaatacaaaaaaaagagaaaaagaaagaaaactatatcatagtacactatgttgcaaggaatatttacatagtcataatattgtaaataacactgatttaaccaaaaattgtgatataatttcactggattttgtcagggagggatgtaagaaagttaaatacgtatctcttctacaaatgcaaagcaaaagataagtttaaaattattttaaaataacagtaaagggccaggcgcggtggctcacacctataaccccagcacttttggaagttgaggctggcagatcgcttgagcccagcagttcaacaccagcctgggcaacacagcaaaaccctgtctctacaaaaaaatacaaaaattagccaggcatttgtggcacatgtctgtagtcccagctacttgggaggctgaggcaggaagattgcttgagcccaggaggcagaagttgcagtgagttgagatcccaccattgcactccagcctaggtgattgcagtgagttgagattaagtcattggactttagcctgggtgacagagtaagactctgtctcaaaaaaaaaaaaaaaaaaaaagtaaaaatatttagaactaaatggtggtatgtaccagaagcaactactagaaactggttgcttctggaaccctgataaaattgagctaggtaaggataggaactcttgttttcactaactctttttttattctattttaactatgtgcatatgtcactttgataaaataagtaaataagtaagatttacttgcaaaacaggtgatgcatttcctactgatacatagattcatcataaatcaaagattgcatttcatcacaccctctgccctagtaacctgatttcgggtccttatttgacaccatggtttgttttcttttttttttttccttttgagacagagtttcgctctcgtcgccccggctcgagtggaatggcgcaatctcggctcactgcaacctccgcctcctaggttcaagcgattctcctgcctcagcctcgcaagtagctgggattacaggcaccgacaaccatgctcggctaatttttgtatttttggtagggactgttggccaggctggtcttgaactcctaaccttgggtgatccacccaccttggcctcccaaagtgctgggattaaaggcatgagccactgtgcccggccatggtttattttctcattctactgggacttaatacttatagcagcagcacatggaatttgtggatctcagtatgagacactctgtaagatgtttctttcttttagattcccttagagaatcaccaaaggaaaattcatgcacagagtataaaatattccccccaaagagacttactaagttttatgaaaataaaactagttatttccacaagatgttctgagttatatttatatagattactatcctgccaagttattttattgttaaaaaataaacacttcatgaaaggtaaacagttctcagtcttacgtagatgctaaaaaagttgatctcatagaagtagagagtagaatagtggttactagaggcgaggaaagggagggggaggaagtgatagctgaaagttggttatgtatagaaaagtacagccagataggagggaaaagttgtagcatgctacagcactatagggtgactataattaacaacaattggttgtatattttcaaatagctagacgaccagattttttaatgttcccaacacaaagaaatgacaaatgtttgagatgatggatatgctaatggccatgtgtaatggcctatttgacattatatacacgtatctaaacatcacactgatggcaacggcgagccttctggagtggccgctgacgtcacgccagctgcagcagggagacacaggcagtggtggcaggattggcttcaagagcagcaatagtggcagtgggtcccctgtgctccacgtcaccgaagcagcccatggcacagctgtcaatgtgggttggtggggggcgggggggaggcggagctgggcctggggcggtgccccactccacaaaggcagcgggacccagggacaagcggggcccgcccaccccaccccacctcaggagccaggctgagcccgcccgccagcagaagagcagcacggttgggcaggaggggcaggcagagaggggcccagcgaggacatggagcccccacaccaggctgcaaggagatgcggccagggctgccgacatgctccaggcagtgagcgaaagccccgccctctcagatgcaggacctggacatctctggattctgcaccctcaggggtccggggaagtccccctgcccctgcaggctcaggaatgtctgctcctgctgcctggcctctcccgactcccagcccctgctccaatcttggagcagggctgaagccaagccaggtaactgtcacagcccggccaggtatgtggacactcagggcggtgctgacgtgctagctgcctgccacctcagcccgctttggactttgggcaccaaaaagcaagatgggggaatcaaggggagattagtgcagctcggtgctggcctgcaggtgccccttggcaggagcagcctgggagccatggatggcggcaggcagcagacaggctcctgggcagaagggggcaggtccccactgaggccccaccttccgggccagggagggcctgaaggctgggggccaggctgctagtcctgtggactggagtgggaacttgtggtgccttttccaggcacagcaatccatagaccaatcagtgcatacttcctcccctctgaggcccataaaagccccaggatcagccagagctgtacagatgatggaacaaccagctgcagggaggaattaccttctctgctgagagctggacagatgatgggaccaccaggtgcagagaggagctaccctctctgctgagagctggaccgaggatgggatgaccagctgaagagaaaagctaccccttctgctgagagctgaacactcttcaggataccctggctacagagaggagctgcccactgcaggtctcctctaagctgttctattgctcaataaagctcctcttcatcttcctcaccctccatctgcatacctcattcttcctgggtgcaggacaaaagcttgggatccactaaatggcaaggctaaaagagctataacataaacagagctgaaacattcttgccacattgtgggcaaagagaaggagagaagagctgcagcccttccagaaggccagacctgggagctccctgagccagggctatgagtccctctttggggccctgcggttcctgatgtctccaagcttccagacgccatcacactccccgggagcagccagagaagctgcttgaagtgcacctggtccagctgcagccttgcaggaaggcaacgcccatgccagcacctggagctacctgctctgtggcagcagccagtgtgtcttgactgcacactggctgtaccccactctagctcacacacccctccccagctccacgcctgactcacgcagtctcccttggaggcatgagatccaggctggtagtgtgagcctgccaggccaagtggatggaaaaagcccagcgggcccagacaaaggcgccaccagccacacgtttctggccagaaaggagacaccctaaagatgctgtaacaacactgtactccataaatatgtataattattaagtaaattaatataacaaaagaaaaaggaaactgtttattcgtaaaaagaaagtgttaaataatacttccagaaaaaaacaaaaagatgttagttgctccatcttcttggtatattttattgtttttgcctgacaatgtgtgtgtgtgttttttttttcatgtaagaattgtcctaagagttccagaggggtcttaggataggactgtgtcagataatatatcccacagaattgttgactattatatgctaggtatgagcccagaccataaaatgtttatagaacatgagaatcagaaagttactaatactctgcttaaatttattatcattataatttgtttttatttattttttttttttgagatgaggtctcactatgttgcccaggctggccttgaactcctggcctcaagcattcctcccacttcagcctcccaaagtgctaggatacaggcataagccaccatgcccagcctcttcttaaatttatagaatagaacactccttattacttttctcccttcctcaactcttaaaagcaaaggagccttttctatgcaaaatatctagaatacctcagaatattacctacttatatctgacagactgtcagaccaataactaattctaggactgattccacaaaccagattaccactctgccttaggcaacttcatgctgccaacacatagaataccaactcctgcgactcagtctccttttcttgcctctgaacataccttgtctatttaggtctatttaaatacacaactacaagagatactcagagcataagcagtattactagagatcaatgaggtaagttattcgtatgcccttgcaattagcttcacactggtttaaaataattaaataatttctttgaagttctgggttgtaactccctttccactcactagcttcctttaaagcaatatttgtccctactcaatagctgatctattcctaacccaaggaagaaactgaatcctcctcaggtccgctggtgcccaaaaatgcctattaaagcttctggttcaattactaggtttcaagtcaaaattgctctctttaaaattagtagctctgaattttgcctattgagacttcctgagtagcttttttctttgctgttctacgcttttcatccatgatcttaaaattggcctccttgtcctcacaagtggctcctcctgtctgtccttattctactttattatccatatttttcatggaagtgaattatcctggatcttctattctcagtaatctcattctggagtctccttgctttaacttagatttctttcttttcttttcttccttccttccttctttcttttcttttcctttcctttttctttctctctttctctctctctctccccccctccctcctttctctctttctctctctctctcttttttttaaagacaggttctcactctgtcacccaggtcggagtgcagtggtgcaatcatggttcactgtagcctcaacctcccaggcttaatcaatcctccagcctcagcctcccgagtagctgggactacagacacatatcatcacacctggctaatatttgtattttttgtagagatggggtctcgctgtgttggccaggctggagattttctaaaagcttagttaaacccaaatataacttcatatcataaggaaaagacagagttccaaatttatcactgggcatttcttcttttcactatcccaactttcccagcctaacccagccctcacccttctcccctccattccaggcaagtttccaagtcaatggtagaacatcacaagttaactgtacttgtaacttttccaatttcactcaagctagtcatatacctaaattcctacaattctgatcaaagttttggaagttcttttgtctcagaacttaagtgactaggaaaagatcattaagtaaataataaagttcaaccaaaatacaaatgccctaacaaagatagaaaaggaaatgatagttctgtccaatagtcaacttttatattccaggctcactttcctaaatagtgttaagtattcttcctgaaaaacccaaaaagtatatttaatttaacattttaccaacttttgtgaaacaactgaagtacaataaaactgcatatacttagactgggtgtggtgactcacacctgtaatcccagcactttgggaggccaaggcaggcggactgcttgagtccaggagttcaagaccagcctggggaacatggcaaaaccctatctctacaaaaaaatacaagttagccaggcatagtggcatgcacttgtagtcccagcttctcaggaggctgaggctggaggatcacttgagcctggggaggtcaatgctgcagtgagctgtgatcatgccactgtactccagcctggccaccagagtaagaccccatctcaaaaaaaaataaaataaactttaatattaaaaaatctgcacacatttaaagtatacaattgaggtcaggcacagtggctcacacctgtaaacctagcactttgggaggccaaggtgggaggattgcttgagtccaggagttcaagaccagcctggggaacacagcaaaacaaaaaaatacaagttagccaggcatagtggcatgcacttgtagtcccagcttctcaggaggctgaggctggaggatcacttgagcttggggaggtcaacgctgcagtgagctgtgatcatgccactgtactccagcctggccaccagagtaagaccccatctcaaaaaaaaataaaataaactttaatattaaaaaatctgcacacatttaaagtatacaattgaggtcaggcacagtggctcacacctgtaaacctagcactttgggaggccaaggtgggaggattgcttgagctcaggagttcaagatcagttttggcaacatagcgaaaccccatctctacaaaacaaaaataaaataaaatacaaaaaattagctgggcatggtggtgcatgcctgtagtcccagatactcgggaggctgaggcacgagactcgcttgaacctgggaggtggaggttgaggtgagcagagatcacgccactccagcctgggtgacagagcgagatgctgtctcaagaaagaaaaaagtgtacagtcaatcggttttgtcatgcatatataccaatcactaaacacaatgaagaaaacaaaaaccaaacatttctatcgcctcaaaagtttactctgggccggacgcggtggctcaagcctgtaatcccagcactttgggaggctgaggcgggtggatcacctgaggtcaggagtttgagaccagcctggccaacatagtgaaaccacgactctactaaaaataaaaaaattagctgggcgtggtggtgggcgcctgtgatcccagctactcgggaagctgaagcaggagaatcgcttgaacccaggaggcggagactgcagtgagccaagatcatgccattgcactccagcctgggcaacaagagagaaactctgtcttaaaaaaaaagtttactctgcccctatataacctatgctttcccttttctcctgcaccaatatcggcacccagtctccaggcaagcttcctttcacaatagattagtttgcatttcctggaattttatatgaatgtaatcttaaacatgcatgctattttttcctggcttaatttattcagcataatgcttctgagattcattcatgttgttgcatataccaatagagcttcctttttatcactgaatcatctaataaaattttacaaagaagtaaaaagaaaatcctcattgtgaaaacatcttactctatgtatagtacacagaacttacattttcaagatatttctattttgaaagagagaatgtcaaagaaagactactcaatgaaaaaaaattactggtatcataatctttaaggaaaaataaaaacaaattaaagacttcaattacagttgacccttgaacaacacagaagctggggcacaactccccgcaaggttgaaaatctgagtataactttggactccagaaaagctttactaatagcctgacaatcacaagccttaccaaaaacataaacagttgataacacatattatatgccttccacagtgtattcttacaataaagtaagcagagaagaaaaatgttattaagaaaatcataaaggcagggcatgatggctcatgcctgtaatcccagcactttgggactcaaggcaggcagatcacttgaggtcaggagtttgagaccagcctggccaacatggtgaaacccccatctctactacaaatacaaaaattagccgggcatggtggcatgctcctgtagtcccagctacttgggacactaaggcaggagagtcacttgaacccgggaggtggaggttacagtgagccaagattgtgccactgcactccacctgggtgacagactgagactccatctcaaaaacaaaaaataaataaataaaggtaagaaagaaagaaggaagaaagaaagggagggagagaagggaaggagggagggagggaaagaaaagagaggagaggagaggggagggggaagaagaggagagggaagtaaaaggaaaggaaagaaaatcgtaaagaagagaaaatacattttcagtactgtactgtttttatcataagtttatgtcatctgtttacagcaagaatcatctgtctgaagtggcaggcaaccacagctgcagacctcaatctactttacgtatcaaacaattcaattttttcctataatgtcatgattttctctgcttcttgggaacacttccaggatcacaagtggcacttgatatgggtcacatggtgttattcaaggtttagggtactgcactaaacacaataaaaaatatgtgagaaacacaagagatcacttttactgtaatatgccatttactggaaagatgaagtgctcatatggagatgattagcacctcgaatacttacagtacttgagtttactgtaaaaaagcaacaagaggtggccatgcaattactatagtattataatatatattacagttaattttatgcagttatggtttaatattgcattttctgtttgcatttttctggactgcaaatgaggccatgtacgatctgtgtttgtatgcataaggtttgataaattttaacttttaataatagatgtataaattttatggtagtacctgataaaataaactagtatctacttgtattttatgcattcacaacatatctctctcaattttttgatgtttctaagccatgcggctcatctgtggctttttcaaattgttgcaaatctccaaaaatttttccaatatattcattgaaaaaaatctgtgtataagtgaaacctcgtctctactaaaaatacaaaaaattagccgggcgtggttgcaggcgcctgtagtcccagctacttgggaggctgaggcaggagaatggcctgaacccgggaggcggagcttgcagtgagccgagatcgcgccactgcactccagcctgggcaacaaagcgagactccgtctcaaaaaaaaagaaaagaaaagaaacataaacagttgataacacatattatatgccttccacagtgtattctgtgtataagtagacctgcgctattcaaatccatattgttcaagggtcaactgtgtctagctttagcagctcaatatatatacagagatggggtttcaccatgttggtcagactggtctcaaactcctgacctcgtgatccacctgcctcggcctcccaaagtgctgggattacaggcgtgagccaccgcgcccagccacgtttttttatttaacagttgctgatgtttcttgttattttttaagagacagggtctctattgcccaggctggagtgcagtggcatgatcactgcagcctcaatctcccagcctcaagtgatcctcccatcttagcttcccaagtagctgagactacaggcgtgcaagacacccagctaattttttttattttttgtagagaggaggtctcactatgttgtcagggctggtcttaaactcctgggctcaagcaatccttgagattccgaaaagtggtgggattacaggtgtgaaccaccacacccggccctccatttgtatccttgcctgagtccctgcaaatattaagtatgtgtctgtctttcttcatccaaacacccacttattcctacacataaaatctttcttctatgcataaaacaactccattcctaacaaagacttccacaaagtcctatccagttcctacattcaggtccaaggtctctatgtgattttcaattctttccactaactctaaaggtgattcattgtggtctggtgacctataaactaaaacacaagttgtacctcttcttttacttgtattatgaatggtgaagtagaaaaaaatatatctacaatagaaatttccattcagaaaagggaaaagtggaaaacatacggtagtcatgaaggtaaactgccagggcaagagagtacgttcattggtcagcccagttacaagtccaggttttgttccctgagacaaaaaccctgtctatagccctccctggcccttagccttattccttagcaattatttttcaagaagtgggcaatgggtcatgtgcttttgttgaaggttacacagatcttgttgttgcattgaattttgcaacatgtataaccaaattctgattaagttttatcagctaaattttggcagagtctgtaacactgccagttataaacttaaccttattttcctttataatacctattaaggatagaagtttctcataaagactcacttggataggatcccaactgtttttatcgtctactacactagtcatgtcagtagctcggttaatacaccaagaatttgaaataagtaattatacataaggtattttctgtaagagtgttttttagtatgaattacttctttaacatctggcataccacttagaacatccataatctatgtaatgttcttgatgtaaagttttctacaaggagttcactagtcccattacgcttaactatatgttagatcttctattgtgaactctgtttttcaatagcttatgaagctgtttaaatttgctctagcttaaaacttgacaactaaggaccatcaagataataatgcacatattttttaaagttcatatatgtttaccagaagagagtgatatactctgttgtactgtcatcttacagaagccttgaaatcttttttgtcctgtcttacaaaaagaaatgaattggccgggcgcggtggctcacgcctgtaatcccagcactttgggaggccgaggcgggcggatcacgaggtcaagagatcgagaccatcccggctaaaacggtgaaaccccgtctctactaaaaatacaaaaaaattagccgggcgtagtggcgggcgcctgtagtcccagctacttgggaggctgaggcaggagaatggcgtgaacccgggaggcggagcttgcagtgagccgagatcccgccactgcactccagcctgggagacagagcgagactccatctcaaaaaaaaaaaaaaagaaaaaaaagaaatgaattaagacaatgaaatttaagaactagtatgaatgttacactatgaacaaaaagagaggcaatcaacataatgtactagggaatatttcacagattctagttacagggaaagatttcaaaccagtatcctgctggttgttctgtcagctatgatgtcaagatcaagatataccgtaacaaaaatgttagctgcttttctctagttaatataaacaagttaatcattttactattacaacagtcagtgaccaacagtatcaagagttatcaatgactagagttgtcaagaaagttgttagcccttaatgctggtaagtccaacataaagggatttaatcaataatatagatcaactatcatcaaagaaaccaaatacaaatcactattctgtgatactctccctaaacctagactatctggtaaatatgcaggccccccaactcagaggacatctaaatgcaacaagactacttcagcataaattcaccagcactaataggaaaatatcctactaatcagctgtttgttttcacatgttgatcactatgtctaaaaacactccggaatctaatacggcttttgattaatatacacagtttcctctaatctagaaaaaggttaagtgttcaaagcttgcaaagttagcaaagctaactaccttcaggtctcctcgtctcttggttattgttttggtcattcttttaataggattttgcagaataataacaactactaaaaagaaagtattaataaatcaaatattcgctaagtatatacaatatgcacagcactctggggcatatgttttttttaagtcataaagtctgcccatcaagaataacaattttggctgggcatagtagctcatgcctgtaatctcagctctttgggaggctgatgagggaggactgcttgagcctaagagtttgtgaccagcctaggcaatatggtgagaccccgtctccacaaaaaataaataaactgattaactgggcatggtggcacatgcctgtgtcccacctacttgggaggctgaggtgggaaaaatcgcttgagcctgggaggtcgaggctacaatgagccatgatcgggccactgcactccagcctgggagacagaaatgagacggtctcaagatttacatgaataagattagacaagacgtacatgaacaattagtgaatgggccattatctaataaaatgttgtgctatgtactacagattcaggctttaatgcttgaaagagagtttaggataagagaaaaacaatgttggctaaaattgttggacgcaggcaaggcgtggtggctcatgccttgtaatccagtcccctgggaggctaggacaggcagatagcttgagcccaaaagatcaagcccagcctgggcaacatggcgaaactgcatctctacaaaaaatacaaaaaattagctgggcatggtggtacatgcctataatcccagctacttgggaggcagaggcaggagaatctcttgaacctgggaactggaggtcgcagtgagccaagattgcgccactgcactccagcctgggtgacagagcaagactctatctcaaaaaaaaaaaaaaaaatactacatagaaatgttttgttattaaatttgtttgagaggagtagatgttctgaggaggtggcaccctaaagaaaataaaaacactagacaattcagagttggtgaggccaggcatggtagcgcacatctgtaatcccagcaatttgggaagtcgaggcagggtgatcacctgagctctggagttcaagaccacctgggcaacatggtgaaaccccatccctacaaaaaacacaaaaattagctgggcgtggtgacacgcacctgtattcccagctacttgagaggctgaggtgagaggattgcttgacttcaggaggtcgaggatgcagtgagccgaaattgcaccactgcactctagccttggtggcagagtgagaccctgtctcaaaaaaaacatagtggccttggttcagaaaaagactaatctcaagtagaatacatttttcatttattttccatttaccttgttttctcaatcccctcaaattctgttcattattttattcaagtaatacatggttacgattataagcaagattagaagtacataaaaatattttctttgtttctttctttctttttttgagacggagtcttgctctgttgcccaggctggagagcagtgacgtgatcttggctgattgcaacctctgtctcctgggttcaagcaattctcctaccttggcctcccaagtagctgggattacaggagcccgccaccacgcccagctaatttttgcatttttagtacagatgggggtttcaccatgttggccaggctggtcacaaactcctgacctcaggtgatctgcccgtctcagcctcccaaagtgctgggattgcaggcatgagccaccgcgcccagcctagaagaacataaaaatattaagtacactaatctatcctcaaaacagtatgtctaatgagatatgcacataagtgctaaaaggtataaatggccgagcatggtggcttacacctgtaatcccagcactttaggaggctgagacaggtggattacctgaggtcaggagtttgaaaccagcctggccaacatggtaaaacctcgtctctactaaaaatacaaaaattagccaggcgtggtggtgggcacctgcaatcccagctacttgggaggctgaggcaggagaattgcttgaaactgggaggcggagtttgcagtgagctgagatcatgctgttgcactccaccctgggcaacaagagcaaaactccatctcaaaaaaaaaaaaaaaaaaagtataaactgccatgagttcttattcctcacctaaaatattctctgcattggaatgtataacagtaagtcttcggaagtaaaaattggagctccattaatcctagataaatctctcttttgctctaaaaatataaagctactgttttcaggaaaataatttagaaatttacattgcttccttatataatatattctaaagtggttatcctttttaagtgcatgaaccttttataataaaatcccaaaaatatcgttccttgctcttaaaaaatatatgttattacttttactattaaaacaaaacattattagctagggaataaagttctttccatctacaactggcagcttgtgtagtcctgtagctttctttatagatatactgatgttaaaatactgctatgatatctcaaaacattaatttcagaatctcaccaagaataatgatgctctgtttactcagacttaaaggtccaagctctccataggatttttttttctccataggattttgaaaaagaactcacaagggtcatatgcactgacccttccctagctttgcaactaattaccttgtttataaatcccattatttaacttgacctccctgcagttgtggaatatagatcatccattccatgagtctatccacccactaaaactaaattcaagcttcaaaattaccagccctgccaagctcagtggctcacacctgtaatcctgacactttgggaggccaaggtgggagaggatcatttgagctcaggagttcaaaaccagcctgggcaagatggcaaaaccacgattctacaaaaaatacaaaaattctttgtctcttttgatcgttgttggtttaaagtctgttttatcagagactaggattacaacccctgctttttttggctttccatttgcttggtagatctttctccatccctttattttgagcctatgtacgactttgcacgtgagatgggtctcctgaatacagcacactgatgggtcttgactctttatccaatttgccaatctgtgccttttaattggggcatttagcccatttacatttaaggttaatattgttacatgtgaatttgatcctgtcattatgatgttagctggttattttgcccattaattgatgcagtttcttcatagcatcaatgatcttgacaatttggcatgtttttgcagtggctggtaccggttgtttctttccatgtttagtgcttctgtcaggagctcttgtaaggcaggcctggtggtgacaaaatctctcaccatttgcttgtctgtaaaggattttatttctccttcacttatgaagctcagtttggctagatatgaaattctgggttgaaaattcttttctttaagaatgttgaatattggcccccactctcttctggcttgtagggcttttgcctagagacccactgttagtctgatgggcttccctttgtgggtaactcgacctttctctctggctgcccttaacattttttccttcatttcaaccttagtgaatctgacaactatgtgtcttggggttgctcttcttgaggagtatctttgtggtgttctctgttcctgaatttgaatgttggcctgccttgctaggttggggaagttctcctggataatatcctaaagagtgttttccagcttggttccattctccccatcactttttgcagtggctggtagcagttgtttctttccatgtttaatgcttccttcaggagctcttgtaaggcaggcctggtggtgacaaaatctctcagcatttgcttgtctgtaaaggattttatttctccttcacttatgaagcttagtttggctggatatgaaattccgggttgaaaattctttaggaatgttgaatattggcccccactctcttctggcttgtagggcttttgccaagagaacaccaatcaaacgtagatttggtcttttcacatagtctcatatttcttggcggctttgttcatttctttttactcttttttctctaaccttgtcttcttgctttatttcattgatttgatattcgatcactgataccctttcttccacttgattgaatccgctattgaaacttgtgcatgcatcacgaagttctcgcgccatggttttcagctccatcaggtcatttagggtcttctctacactgtttattctagttagccattcgtctaaccttttttcaaggttttttagcttccttgcgatgggttcgaacatactcctttagctcggagaagtttgttattaccaaccttctgaagcctacttctgtcaactcgtcaagtgattctccatcctgctttgttctgttgctggcgaggagctgcgatcctttggaggagatgaggtactctgatttttagaattttcagcttttctgctctggtttctccccatctttgtggtttttatctatctttggtctttgatgttggtgacccccagatgggattttggtgtagatgtcctttttgttgatgatgatgctattcctttctgtttgttcattttccttctaacactcaggtctctcagctgcaggtctgttggaatttgctggaggtccactcaagaccttgtttgcctgggtatcaccagtagaggctgcagaacagcaaatattgcagaacagcaaatattgctgcccgatccttcctctggaagcttcttcccaaaggggcacctgcctatatgaggtgtctgtaggcccctactcagaagtgtttcccagttaggctacacaggggtcaggaacccacttgaggagacagtctgtccgttctcagagctcaaatgccatgccgggagagccactgctctcttcggagctgtcagacagggacgtttaagtctgcagaagttgtctgctgcattttgttcagctatgccctgcccacagaagtggagtctagaggcagtaggccttgctgagctgcagtgggctcctcccagttcaagcttcctggcagctttgtttacctactcaagcctcagcaatggtggatgcccctccctcagccaggctgccacctcacagtttgatctcagactgctgcgctaacagtgagcaaggctccgtgggcatgggacccgctgagtcaggcacgggagagaatctcctctgctggttgctaagaccttggggaaagtgcagtatttgggcaggagtgtcccgtttttctagttacagtctgacatggattcccgtggctaggaaagggaaatcccctaaccccttgcgcttcctgggtgaggcaacgccccaccctgcttcacctcgccctccgtgggctgcacccattgtccaaccagtcccaatgagatgaaccaggtacctcagttggaaatgcagaaatcatccgtcttctgcatcgatcacgctgggagctgcagaccagagctgttcctattcggccatcttgggccattacgtaatggtaaagggatcaattcaacaagaagagctatctatcctaaatatatatgcacccaatacaggagcacccagattcataaagcaggtccttagagacctacaaagagacttggactcccacacaataataatgggagactttaacaccccactgacaatattagacagatcaacgagacagaaggttaacaaggatatccgggacttgaacttagctctacaccaagcagacctaatagaaatctacagaactctccaccccaaatcaacagaacatacattcttctcagcaccacatcgcatttattctaaaattgaccacataattagaagtaaagcactcctcagaaatgtaaaagaatagaaatcacaacaaactgtctctgagaccacagtgcaatcaaattagaactcaggattaagaaactcactcaaaactgcaaaactacatggaaattgaacaacctgctcctgaatgactactgggtaaataacgaaatgaaggcagaaataaagatgttctttgaaaccaatgagaacaaagacacaacataccagaatctctgggacacatttaaagcagtgtgtagagggaaatttatagcactaaatgcccacaagagaaagcaggaaagatctaaaatcaacactctaacatcacaattaaaagaactagagaaggccaggcatggtggctcacgcctgcaatcccagcactttgggaggccaaggcgggtaggtcacctgcggtcaggagttcaagaccagcctggccaacatggtgaaacctcgtctctactaaaaataccaaaaaattagctgggcatggtggtgggagcctgtaatcccagctactcaggaggctgaggcaggagaatcgcttgaacctgggaggcgaaacttgccatgagccaagaccatgccattgcactccagcctgggcaacaagagcaaacctctgtctcaaagaaaaaaagaaaataaaaagaaatagaaactagggttaattaaaaatggcaaagaatggttctatataatataccaagcctaaaattcctattttttttttttttttttgagtcagagtctcattctgttgcccgggctggagtgcagtggcacagtctcaactcactgcaacctccgcctcctgggttcaagcaattctcctgcctcagcctcccgagtagctgggattacaggcacccgccactaagcccagctaattttttgtatttttagtagaaatggtgttttaccatgttggccaggctggtctcgaattcctgacctcgtgattcacccgcctcggcctcccaaagtgcggggattacaggtgtgagacaccttgcccagccatagtttttattatcttataaaatttattctttttttcttttgagacagggtctcactgtcacccaggctggagtgcagtggtgcaatcatagctcactctagcctcaaactcctggactcaagcaatcctcctacttcagcctcctgagtacctgggacttacaggcacacaccatcatgtctgctaatttttttggttgctgtttttaagtagagatgaggtctcactatgcccaggctggcctggaactcctgagctcaagtgatcctcctgcctcgatctcccaaagtgctgagattataggcataagccaacatacccagccaataaattttattcttatttctcatttagaatgacaaaatgtacatctgtgtacataactacaaaatagtaaacttttattttattttttttagagacagtgtctcactatgttgcctagactggactcgagttcttgggcttaagcaagcctcctatttcagcctcctgagtagctgggactacagggacgcacagtggcgccggttaaacatattatttttagaaacagaatatatcaacttagcacattttatttctacctaaacattttagtagaacttaaataaaaatttaattaagtcccaataagttagtatttcatttacaacatttaattttatagaattaactatgttttactatacagaaaattttctttaacataaaatttataaaacatatttgcaacataaaaatttttatgtcacagagattaactttctaagaataagaagccaatcatggaaatgttcctatgatcataatcagtggctattaaagctctaaagtacaaaagaaacagaattacagctctgtagtactcccacttgacctctaagaacacagccacgttgacatctaaaacaaaacattgtttacccactcaggaagaaaaataactacaggtaagattaaatctgttaagagcagaaggcccctcaggaatttaggctggtggaggtggataactacctcaaaggaaaacttagaacaaaaagattacctcagcaacctttggaggcactccatccccaagcacttcccggatgaagcagtgctggcccatgtaatatgagagtccacaggtcctcttgaaagcatccttcagtcgttttagctctacatctgtaactgcaattcagaaacagaagatgggtaagaaatcaggagagaaaagaggtgtctcataatttttttcaacctggctcctaagaaaaattgaggctaggcacagtggctcacgcctataatcccagtactttggaaggccaaggcaggcggatcacttaaggccaggagttcaagatcagcctggacaatgtggcgaaaccccatctctacaaaaaaaacaaaaattagctgggcatggtggtgcatgcctataatcccagctacttgggaggctgagacacgataatcacttgaacctgggagatggaggttgcactgagccaagaccatgccgccgcactccagcatggacaacagagcgaaactctgtctcaaaaaaataaataaataaaaagaaaaaaaaagaaaaattggcaagcattacacttcttttttggttaaataaaactctatgacatttagtcataattctaatattttcaaatctaatttagaaaataagtataattttttttttttaagagatgggtctcgccatgttgcccaggctggtcttgaactcctgggctcaggcagtcctcccaccttggcctccagaaatgctgagattaaaagcatgagccagcacgccaagccaaaattcttaacattcaattttcaaaagacaaaactttaatataggcatacaaattttaggcaggggcaaagaagtaacaaatatttcaaattagcaggtaagctaaatgccactggattctggcattaatgttttcagcagcaatacattaatctcctttgtgataaaaattatattatttgtactccttgagcacatctctatccatatggagaacagtcttcaagtttagcttggattttgtcattatttaaaaagaaaatagttcataaacagatgatattaacaaactaaaatttttagatacttattatcaaaaacaaaaaaattactgagccattactttattttatgcattgaaaactttttttcactatatggaacaatctctatctacaagaacaaagaaataaacaccctttactattacatgatcagtaccacaatcacaatagaggcacagaaatggtacctttgacccatgctagagaaaacagagaattcttccagatgaagataattacattaaattttaaaggctaaaccaagcaaaatgaacaaggatatgctggtcagaaattacagtttgcttcaaagtacaatgaagtataaaaatgtatcataaaagtatcttactacagcaaagcacggagtagcaaacgataaacctagagaggcagcaagaccaagtcacagagactctgtcctgtcataaggaagggacacagtcagatacaactcagataaaaactgcaggcagacgagaaaaaaacacagtgagatataattcagatagctcactctaccaataacaaagagaacagaacaaatctggaagcaatagcctgctactacaagaaaaggagctaaatttgggaaatatccagagggtcagtagaacttgaagctagactgagagtagaagcagtactgggaagcttttttttttctttttttgagacagagtctcactctgtcacccaggctggagtgcagtggcatgatctcaggtcactgcaacctctgtctcccaggttcaagcaatttgcctgcctcatcctcccaagtacctgggaatacaggtgcgcaccaccacacctggctcattttttttttttttttttatgagacggcatcttgctctgtcgcccaggcaggagtgcagtggcacgatttctgctcactgcaagctccgcctcccaggttcatgccattctcccgcctcagcctcccgagtagctgggactacaggcgcccgccaccacgcccagctaattttttgtatttttagtagagacagggtttcactgtgttagccaggatggtctcgatctcctaacctcgtgatccacccgcctcagcctcccaaagtgctgggattacaggcgtgagccaccgcgcccggcctacacctggctaatttttgtatttttagtttcaccatgttggccaggctggtcttgatctcctgacctcaagtgatctgcccaccttgactgggattacaggcttgagccaccgcacacagccagtaccgagaaacttcaaggattatgttattatgtagacagagaatgtaagaataagtcaggaaaggctgggcgcagtggctcacgcctgtaatcccagcactttgggaggctgaggcgggcggatcacgaggtcaggagatccagaccatcctggctagcacaatgaaaccccgtctctactaaaaatacaaaaaattagccaggcctggtggcgggcacctgtagtcccagctacttgggaggctgaggcaggagaatggcgtgaactcgggaggcggagctcgcagtgagccaagatagcgccactgcactccagcctgggcaacagagcgagaccccgtctcaaaaaaaaaaaaagagtaagtcaggaaaaaagatgataaacttttttaaggatactgaatatgggaaaccttggaaaatgcaatggggttttagaattttaaatgtaaagcttaagagaggttgataggagtcatcagtatagaggtagtaattaaaaccatgaggaagaagcataatgagacacaccaaaactagaagaagccagtgtttccaagaggaaggaaacagagggaaaaactaagaaagagaaagaaaattgatatggaatagtcaggagaaaagaaggagaagtagaagagtatgctctccaaaggccaggaaaaggggacttatcaagttaaggcagaaaggaccagcaagataaagactaggccaggtgcagtggctcatacctataatcctagcactttgggaggccaaggcaggaggatggcttgagaccaggagttagagaccaccctaggcaacatagtgagaccctgtctctacaaaaacagaaaaattagccacacttggtggcacgtgcctatagctactcaggaggctgagatgggaggatcacttgagcccgggaagtcaaggctgcagtgggccatgatcgtgccactgcactctagcctgggtgacagagcgagactgtcttaaaaaaaaaaaagataaagactaaagagtgcttggcacacagttaatcactttgataaatgcttgtggtaggaagggggggttcatggttcagcaacatagagtaatgataaaacaataagaaccactagttgaataagtagctagagaaaagtatgactattaggtactttatttaaaattggatttataatattaacatttgcaattgaaggaggtaactttggctgcggaatatgtatttcttcaagatgcctaattttcattaatggctttagtaacaaattaggttgttcacagtctagtggaggagacaagaaaattaaacattcaaataatattagaataatatatgactaaatattagaataacatagtattagaatatattacaatataattaatctaatatattaattatatattaatctaatagactacctgtataacagtataggtaatctcctatagtgttggttacagattatttgaagaactacttggtaatatgttttttaaaaatataatctggtggctgggcacgatagttcacacctgtaatgccaggactttgggagactgaggcaggtggatcccttgaggccaggagttcgagaccagcctggccaacatggtgaaatcccatctctactaaaaatacaaaaattagccagccgtggcggtgggtgcctgtaatcccagttactcaggtggctgaggcaggaggattgaggaggcaaaggttgcagtgagctgagatagccccactacattccagcctggacaatgacagagtgagactctgtctcaaaagaaaaaaaaaaaaaaaaaaatatatatatatatatatatatatatattatatatatatatatatattatatatatacatatatatacacatatatatatacacacatatatatatatagcaatctgatgactaatgaatttattcacttaaactgtagggaaatgtacatataaataagcttttaaagcatttataagaagcaaacaatgtccatcaacaaaggacagattgaataaattattgtatacatttagaatatcatacagacactgaaatgttcctacagatccatatttactgaaaataaatacataaaaatgttcaccatacagtgaaatgttgaaaattttgaaaataaaaatttaagcaagacagaaaatataatagaatcaagcctaagttctgctctgtggttttttcgttgttgttggtttttgtttttttttttattttgagacgggatctcactctgtcacccaggctggaatgcagtggcatgatctcagccactgcaacctctgcctcccaggctcaagcaatcctcccacctcagcctcccaagtaggtgggaccacaggctcccactgccacacgtggataattttttgaatttttaaatagcgatggggttttgccatgttgcccagactggtctcaaactcctgagctcaagcaatccactcgccttggcctctcaaagtactgggattacagatgtggtaatttttgagactgagtctcgctctgtagcccaggctggagtgcagtggcatgatcttggctcactgcaacctccacctcccaggttcaagtgattctcctgcctcagcctccccagtagctgggattacaggcacctaccataacacctgggtaagttttatatttttagtagagatgaggtttcaccacgttggccaggctggtctcaaactcctgacctcaagtgatctgccagcctaggcctcccaaattgctgggattacaagcatgggccaccgtgcccggcccaggtgtggtaaattttttaaataagaaaatgatattagttatcttcgtattagaaagaaaaagtagcttcagaaaaggacaaagggacttttcttaaatcttctctctctccctctatccctctctcagtaaaattacagtgagaataaaagaagatataaactcacaaggacagagggataaaaaactacataataggtataatgtaccctactcgggtgatgggtgcattaaaaatctcagatttcaccactgcacacttcatccacgtaacgaaaaaccacctgtaccccaaaagctattgaatttttttttttaactcacaaagacaaaaataggacaagagagacacgagaacctaagagacagtcaaatttttctggtgcacattaagtatctggagtggtcactgacctaagccaacccaagaaagttaaaacctagcagctgagaaattcaaacaagaagcaaacgaatttaccctgtccatagccccaaaaggctcagaaatggatggtaccaattaccacaaaagtcaggggggtaaaaggtgaggctgagaaaaaaaaatagagattggttcaaagtctatgaggagtagttagactctctggacccttgcagcacaaggcaatcaggcaccaatctaccacctacccaaacccccatcactttcacaccaaccttttagcaactcccgggctcaagtgatcctcccacctcagctgcccaagtagctgggactacaggcatgcaccactatgtcaggcccttcctagctatttttaatttgtacctttagctgatttttttcaacaagcatttatgaaatgtctactatgccaggcttctttttttttttcgagatggagtctcactccgtcccccaggctggaatgcatgatctcagctcactgcaacctctgtctcccgggttcaagcaattctcctgcccagcctcccaagtagctgggagtacaggcacgcaccaccgtgcctggctaattcttgtatttttagtagaggcggggtttcgccatgctggccaggctggtcttgaactcctgacctcaggtgatccacctccctcggcctcgcaaagtgctgggattacaggcgtgagccaccaagcccagctgtcaggcatttattaaatgtctacttatctcagtcaagatgagtaatacatagtctccatattctaatacttcaaaatttagtagaaaagacaggacacaacaaaaataactataataccaaatatgaaatattaaactggaggtattcaatggagttccaaaatagggaataattaggaagtggtaattcctaaagagtaggggttcacctggcaaaaaaaaacgcaaagggctattctatgcagggaaaacacatataaaagaataaagtggcatggataatcaaagaattgcaagtagtatgatataaatggagtacagggtataagaagcagagttgtcagaaatgaggttagaatgataatgggcagacaaaacagaaccctgactttattcaagatgataatgtccttagctaaatgactatatttttcagtttcccttgcaactagaaatggccaatgaaatgcagtagaaatgactggggggacctccatgaaggcttcttaaaaggtaacagctggcaaatatccttttgcccttatctcttcttcccacctggcacttagatatacaatggctgcatctccagcagccattttacacacctatttttgagtgaacgtcaaagttataagccatacagtaaggatggcgaggtcaaaaagatttttaaaagcctagatgaccatggaactgccatatgacccttggatatcctacctccagatttacgtgtgagaaaaataaacccttatatcttatttaaactattattttgtttaatatacatccaaacttaaacctaactgataaaggtatcaggtacaagtttatggaaggccattctaagccatgttaaaaatcctttcctggctttaaacaaagaagtaacaatcaggtttacatgcacattggtgtcgatgcaataaacaagactgggaaaaggtcagaatggaggtataaagaccagttgagcggttactgcatttgttcagacaagagatgaactcaacaaaagaactcgaaggcacagcctcaagcgatcctgccacctctgtctccaaagtgctgggattacaggcctaaggcataaagtaaaaagggaggtaagaaggcagattcaagagataaactcaactgaacagggttcactgaataattagctgtcaaaggactagaaagaaaaaaatgatctttgatgatttcaaagtgtctgcctgtttctaagatatactcagtgctactgatgaagattagtctaggggagaatttgaatatattacattgtatttacatttctgttatgaaatgaatgtatgtgtcctcccctcaaattcatatgttgaagccctaacacacagtgtggctggttttggagtaaggaagcaattattgttaaataagcttataaggataggacgctgaacttacaggattagtgttcatagaagaagagacaccaaagggctcaagcgcaacataggcacagaggaaagagcatgtatggatgcaacgagcaggaaaggctctcttctgcaggccaggaagagagccctcaccaaaaacaaaaccttgctggaacccaacgttatttccaatgggaaataacatttctgtcgtttaatcatccagtctttggtattttgtgatggtagcccaagctgactactatcatttctatagtaccaatggtaaatagaccaactcctccattttaatttagatagaggccagtgcggtggctcacacctgtaatcccagcactttgggaggccgaagcaggtggatcacttaaggccaggagttcgagaccagcttggccaacacggagaaacaccatctctactaaaaatacaaaaattagccagggatggtggtgcacacctgtaatcccagccactcaggaggctgaggcaggagaatcgttcgaacctgggaggcagaggttgtggtgagcagagattgcaccactgcaccccagcctgggagacagagtgagactctgtctaaaaacaaataaaaaataatttagataatctatgtaaatcgcttttacaaagtcatatgaagagatcagaactcactgtccatgaaaggaaaataaaattatgtaattaacaattgcacaaaacaaacataagagagcagcacaacgctcattgtcatgctctaaacttttagaggttaccgtgtctacaccagtagttattaaccttttctgcagtgacacagaatggatgttgtcattaccatgagcattccgtaaattctagctgcaactatactctttacttccagtcaagaaatcacatgcatgtgtgaaatgcatgaaattaaatccatttttgtaaaggtaagcttttttcttgaagttcaatactttattattactcattacatggtataaaatatttcacaataaaccacaatactggtgttctattcccctattatatactgctttatattataactttttttcaaaggtaatatttgtcttatctctccaagtatattttaagtctcttgagagcaaagaccaagtctattcttcatctctatttctttaagacagccaaggcaggaccatgcattctgatttctgttataggataggagtttccgttttaacagtttggttccaaaggcaaagaggaaaatttaacaacatctgaatcagaggataaccacagagataaataaacattgggaaatatgcctttcactgccaaagtgggctaagaatttacaaacctaggacaagaagaaattgtataatgcagcaaagaaaacacaaccaacatatttgtaaatctgcttggtgcagctgatctgaagtaaattaacctatcaaaagtcactttggtagggtccctgctaaaaaaagctactgcagagccacttcaggtagatgataaaacccagatgggacatctcaggcaagagggggcctacaactagcaattttttttgctactggtgactttgtgccaaatgtccatgaacaaatgaatccaaaaaagtatgatataaggccaggtgtgtggctcacgcctgtaatcccagcactttgggaggctgaggcaggcagatcgcttaaggtcaggagttcgaaaccaacctggccaacagagtttgctccctctctactaaaaatacaaaagttagctgggcatagtggcggtgcctgtagtcccagctactcaggagactgaggcaggagaatcacttgaacccaggaggtggaagttgcagtgagccgagatagcgccaccgcaccccagcctgggcaacataatgaggctctgcctcaaaaacaaaaacataaaactatgatacattcttattatagaatacttttcagcataaaaaggagaaaacgaaagtgctgatatatgcaacaacatggatgatgctcacagatattatactaagtaaaagaaggctgattaaaaaaaagagcagatactctgtgattccccaagttctagaacaggaacaactcatcaatgatgacaggtcagaacagttattgcctctgaggatgtggtaaatttactggtaagaggaacaagtcaactttcataggtgatagaaatgttctgtatcttgtcaaaatgcaaggacacatgacttttgtattttaggatataaaaattttccctccaaaaaaacctgtaaggagaccgattgccggaatggtaaagacctctgaaaatccattcttctaaaaaagcagcaagaacactatcaaaaactgtcaaaatccaactttttcagaactctagaaatcaaccaaatgcttgcaataatccaaagagctttattccagaaaaatgactgagctgagtgcggtggcaatcccagcactttgggtgactgaagcagatgaattgtttgagcctaagagtttaagaccagcctgggcaacatggcaaacactgtctctacaaaaactacaaaaattggtggcacacgcctgtagtctcaactactcaggagactaaggtgggaggatcactagcgcctgggaggtcaaggctgcagtcagccatgatcatgccactgcactccaggctgagtgacagctcactctctcaaaaaaaaaaaaaaaagagagagaaagaaaaaaaaaaaagaatggctgaacctctgtaaaaaaaaaaaaaaaaaaaaaaaagcagtatttgtggtgttttaacatgttctattcccatcaccttctccccagctatgcaatagctttgaaaaccaaaaatctccctaagctgtaaaaaccaacagtcaaacagccactgaaggaggcagaatgggtttagagcttctcaaaagaagtgtcaatatttgacctatctggtagctcattaaaaagttccattctcaagctttgtctttatttgatctggctttgagttcactctacaaataaaactttttcccctggcattcttcaaaaacaatcagtggcaactatataacttcacagctgcctgagaaagcagtggcagatggggctaacaagaggttaaccaaaaaacatgaaaggaaaacctggaaaacagcaagcccacaagggctttgaaaggctctgacatattcctggaaatccaaaaggccacctgcatatggagagctgtgcatgtgccccaaaattcccatatctctcactttggctgaccttaaacctccacacaagcaggaagtgaaggctaaagcagagttgcaaactgactgtacaacatttgaacacacacccgagtagtatagaacccctccgccaaggctgaacttataggttcaaggcatttttaaaagtctctgtccaatcttagctgaccactaagctaaataagcacacacaaaaaagaatacacactttataaaatcagaccaagaaagtcactaagcaaataaataatagcaggaacaacaacaaatagcagtaacaaaccttaaggtagggaatccaatttccagagctgccacactacagtacttaaaatgtctcattttcaacaaaaaattgcaaagcatttaagtaagaaaatgaagcccatacacaggaaaaagggcattaaatagaaactgtctgtaggcaagtccagacatttgatttactaggtaaacactttaatgaactatttataaacaagttcaaagaagaaaaaaaaacatgcctaatgacttcaagtatgagaacactgtctcaccaaatggagaatatcaatagtgagatgagatggatattataaaaagaaaccaattagcaattctggagttgagaagtatgaggttgcagtgaactatgattgcatcactgcactccagctgggacaacagagtaagaccttatctcaaaaaaacaaaacaattgcaaaatttgaagacagtcaattttgattatccagtctgaggaacagaaagaacaacaaatgaagaggccaggcactggctcacacctctaatcccagaactctgagtggtccaggtgggaggacagcttgagaccaggagttcaagaccagcctgggcaacagagggagaccccatctctacaaaaaataaataataattaggcaggcatggtgatacacgcctatggttccagctacacgggaagccaaggcaggaggactgcttgagcccaggagttggaggctgcagtgagctatgattgaacccctgcactccagcctgggcaacagagcaagaccctgtctcttaaaaataaaaataaatatatatatgatatgtagaccaagcaagcaacagagcaagaccctgtctcttaaaaaataaaaataaaaatatatatatgtagatatatcagtacattcatagtcatacatctcttgctgacaactcccaattccttatacaaaaggacaaaaatgtcctaagggtacctttatctttccaagtgattaatagtagttaatatcattaaacattctcaggctgaagctgaattaatctctggaaaggactggatgactcagcagtgaagagtattcatattctcaagcattggcatttagatacttttttttttttgagacggagtttcactcttgttgcccaggctggagtgcaatggcgcaatctcaactcactgcaacttccacctcccaggttcaagcagttctcctgcctcagcatcccaagtaactgggattacaggcatgtgccaccacacccagctaattttgtatttttagtagagatggggttttcaccatgttggtcaggctggtctcgaactcctgacctcaggtgatccacccgcctccacctcctaaagtgctgagattacaggtgtgagccaccacacccagccctagatacatttttaaatgactttttccatttaattgtctgcttcatctagcattcccatagtattgtttctactacttttttattgcaaatatagagtatttcagctatactatgacttaattttctgtaagccaccaccctatgaacctaatcatcacttataacattgtttctacggaaaaataagttttaaattccagatgaacttttgaacacaatccaggctgggcatggtacctcacacctgtaatcccagcactttgggaggctgaggcaggtggatcacttgaggtcaggagttcgaggccagcctggccaacatggtaaaaccccatctctaccaaaaatacaaaaattagccaggtgtggtggcgggtacctgtagtcccagctacctgctaggctgaggtgggagaatcattgaacccagtaggtagaggctgcagtgagccgagatcatgccactgcactacagcctgggtaacagagggagactctgtctcaaaaaaacataataaaaataaaaataaaggtaatagtcctctgtgcttcaagaatataaaagaccactaggaaaacagaaggtcaagtaagtttttaacatctaaaaatgagattaaaaaatgaacattattcttacagaaggagtttatcatagatctaattttgagaaactagatgagaccaggatattgaggatgacggtgcttcgcaaggttttgatattacatcatggggcaccactgacaactaagaaaatatagcttagtctatgattacagggccaacagggatgtcacttgccaagattgagaatctctggcttaggccaaaaagatttaaaatgttataacacacaataaattgataaaaatttaaaatgcaaaccttagaaccagaaggtagagacacacgagaggttccagctgctgcaaactacttctcattccctaaccacattatgttcactgctactgtccttgcagtgtcctctgcctatgagctccaatcatactctgaacaatccaacatccttcaaggcttggcttaatgtccctcctttattttttggaagcctattctaattgcttccatgccccaccacctaaaatgttaggtgtccctcctacaaaataactttccttataatcacttattcaatatcaaattctcaatgctttaactttaaaataacacagcttatattgtatgtttattgaattgtatatctcccctctgctctttaagaacaaagaaactgccttatttatatgtatccccaacacccagcaaagaaccttaaatattattgatatttttggataaagacagaattttttaaatgatcaaataaatgtgctatctattctcttgtccaaggcctatgcttattactaaacctcagcatctagaacaacttctgacacacagtaagaactcagaaaaaatgttttttcaagcaggacacagtggctcaaacctgtaattccagaactttgggaggctgagatgagaggatcacttgagcccaggagtttgagaccagcttgagccacacagggagaccctgtctctacaaaaagcaaaaatattagcatggtggtgtgcacctgtaccagctactcaggagctgggagctactcaggtgggaggatcacttaagcccaggattggagactgcagtgacctatgattgaaccactatactccagcattccataaagaatgagaccttgtctctgaaaataatagataaataaagagttcatagaaacatgacaatgtttgtaagacaaagattttttttttttttttgagatggagtcttgctttgttgcccaggctggagtacagtggcgcagtctcggctcacagcaagctccacctcccaggttcacaccattctcctgcctcagccccccgagtagctgggactacaggcgcccaccaccacacctggctaatttttttgtatttttagtagaaacggggtttcaccatgttagccaggatggtcttgatctcctgacctcgtgatccacctgcctcagcctcctaaagtgctgggattacaagcgtgagccaccgcgcccggccctgtaagacaaagatccttaaacctggccaggcacagtggctcacacctgtaatcccagcactttgggatgcgaggtggccttctgacttgaggtcaggagtttgacaccagcctggccaccatggcaaaaccccgtctctactaaaaatacaaaaattattttttgtatttttacaaatacaaaaaatttttgtatttgtattttgtattacaggcgcagtggctcatgcctgtaatcccagcactttgggaggccaaggtgggtggatcacctgaagtcaggagttcgagaccagcctggcaaacatggagaaaccccgtatctactaaaaatacaaaagttagccaggcgtggtggcacatgcctgtagtcccagttacttgggaggctgaggcaggagaattgcttgagcctggaggtggaggttgcagggaggcagaggttgcagtgagctgagattgcaccactgcactccagcctgggcaacagagtaagactccatcgcaaaaaaacaaacaaacaaaaactaaaactatacaaaatacatgcagaagtagatgataatgtgaaaaaaatgtggttgttgtgctgggattaattttttaaattagtttttcattacacaagcagtaagtgaatgcattcttcttctaaattcaaacagtatacataaagtaggccgggcgcggtggctcacacctataatcccagcactttgggaggccaaggcaggcagatcgcttgaagtcaggagttcgagaccagcctggccaacatggcgaaaccccatctctactaaaaatacaaaaattagccaggtgtggtggcacatgcctgtaattccagctacaggggagactgaggcaggaaaattgcttgaacctgagaggcggagattgaagtgagctgagaacatgccactgcactccagcctgggcaacagagcaacactctgcctcagaacaaacaaacaacaacaacaaaaacccggtatatataaagctaaacataccactaccataaaatcctacttacttcctcccctcagtcctaatccctcccgtgcccattcagtcttccccaagagataatcagtttggtttgtctcctttcagatctttttccatgcttttataagatgtacccccacagaaacttacagcggttagcatataatacatattataatgcaacttactacatatagatttagttcattccttatgtgctgtatagtttttcattatataacattagtaatatacaggtattcacttactgttcatatttaggctgttacccgtcatgaaaaaccatatacatgcctccttagatacatacagagagtgcttctccagtgagcactagggtcattcccagttttttggtcattgccagacttccttccaagtggctctaccaatttacattcccacaattgtgcttttcctagcctcttgttcactattgcttagtagtttctacaattcaactttttaaaaattatagaagaacctatcctgtatagcctatctaagggtagctgtttaaataatgaagaaaaatcaatatccacttatcctgtcattcagaaggtataaatctggcaccctgctattatgtcctcatttctattcccaagcagaccatctgtaattcaaagtagaaaacagtgtggagagagaaagatacatgtatatatatatatgccatttggcctcaatgctcaatgttaacacaaagatatagtgttaacagtattactatatgtgggtatgtgcctggaaactaaaagtggatccactcttcccttctactatgtccatacaaagttgttcttggctttaccacaatacacatggttagtacagactgtagaatggatggtggctccatatctttacttcacagactgccagtgtctgtaatcaaaatgaaccaccccatctttgcaaagcatcaggttgccccatctgccactacttctgttcccccagcatccctgagcttgaatacatcacattaaaaaaaatcgtagtctgagaaaattctgctcttttctaacagaaagttcgtattaacaagcataaaaatgtgaagaaaaatatagaatgaaatctgtatgttgtacaacaaagctctttgtccatgaatcaaccagtaacaatttataaactttagaggacaaatggagaaatacgcaagttggatgggttttcctctactaagaatgaatgctcccattctgaaacatgtaaaatatgccactataaaattaacaatttaaattaatttctgaggaggaatgtgtctttgaaaactgcccacaagaacagaacataaatttagaaagacatcacttagtttattgtcacaggaaatctgttgtatacttaaacgctgcaggagagtcttaaacatatcatggagagaatgtccttaagtattcattagtttttttcgtttccataatataacaaaatgactatttaacatatgttgatgacaaatgttctagtttattcatttgcttccagcagtttctcgaatcaaatacacaatttatcattctcctggttcacaaacttctgaagctatcaaaaatgtggtactcattagttcaactatattaaaaaatgtttccaagtatccttctttccctcaggagaggaaaaaaaaaaacaaaaaacaccttagtcaaaaggcagctaatagtccaatttcctttacaaatctaaccaaattgtaataactgattgtctttaactcattaaacaaaataagattaataataaatgttgcatctaatccagcattttactctttaaaaagaatttttggccaggcacagtggctcaggtctataatcctagcatttgggagaccaaggagggaagatcacatgagaccaagagttcaagatcagcctgggcaacacagtgagaccccatctctattttttaaaaaatattaaattttttaaattaaaaaaaaattttttgaggccaggcgcggtggctcacacctgtaatcccagcactttgggaggctgaggcgggcagattgcctgagctcaggagttcgcaaccagcctaggcaacacgatgaaaccccgtctctactaaaatacaaaaaattagctgggcgtagcggcgtgcacctgtagtcccaactactcaggaggctgaggcaggagaattgcttgaacccgggaggtggaggttgcagtgaaccaagattgcgccactgcacttcggcctgggtgacagagcgagactctgtctcaaaaaaaaaaaaaaaaaagcgccactgcactccagcctgggtgacagagcaagactctgtctcaaaaaaaaaaaaatttgagacagggtctcactctgtcgccaaggctggagtacagtagtgcactgtaggcttgacttcccactctcaccctccttagtagctgggaccataggtccatgccaccatgcccagctaattttttgtttttttcagggttttttggtggagatggagtctccctacgttgcccaggctagtctcaaacacctgggctcaagcaatcctcccacctcagcctcccaaaatgctgagattatacacgtgagccactgtgcctgaataggtataatttcataaaattcttgtaatttatcaactctgtgttggttcctttgtttttgggagaaggaaggaggaagggagggagaaagaaggaagtgttgggggggcaccttacagacaaggttacaagttttcagcttccctaaagtaatcagtgatgattctcgtgcactattattcccccaaaacatgcttaatctgttcaggctgctacaacaaaatatctcagattagataatttataaaccagggaaatttactgctcacagctctggaacctgagaagtccaagatcaaagtaccagcagattcagtgtctggtgagagccttttcctcataaatggtaccttctgtgtcctgacatggtggggcaaagcaagttctctcaggcctcttttagaagggcactaatcccattcatgagggcagagccctcatgaagtaatcattcctgaaggccccacttcttcatacaatcacattgggaattaggtttcaacatatgaatttggtggtataagggaacaaacactcagatcacagcacctgctaagccaatcatatttatttggtttttgaggggttgtctgtttgtttcagacagaagctcactccatcacccaggctagagtgcggtggcgcgatgtccactcaccgcaacctttgcctcccaagttcaagtaactttcgtgcctcagcctcccaagtagctcagataggtgcgcgccaccatgcctggctaatttttctatttttagtagagacagggtttcaccatgttggccagactggtctcaaactcctggcctcaagtgatctgcctgccttgcctcccaaagtgccgggattatgggcgagagccaccacactcagcagcccaagccaatcatatttaacattcatgaatttacaatcatttactatgtccattctatttcacttttattagcagtcttttacaacataataaaggccaacataatttatccataatttatccataaattccattgttcactaatgtttgtgaagaaacaaaaacctaatcctctaatgagattcatcttctatatacaagtcaaaccttatattttagacccaaattttatatttgtaaagaaagccacaaataacaacatggatttacatcttcatcaaatgattacaaaaaggtcagatgttatacattactactagtactatctaaacccataatactcaagttgaaagtaaattccttatgccttttagttaagaaatcatgttatttcaaaaagggaaagttttttttaaatgaagaaaatgttcattgttttccagtcttcattatcaactaagctctattcagttaatctgatttcataaataagcttatttctttaaaaatgaccatgttttagccgggtgcggtggctcatacctgtaatcccagtactttgggaggccgaggcgggtggatcatgaggttaggagttagagaccagcctggccaacgtggtgaaaccttgtctctaatgaaaaaatataaaaattagccaggcatggtggcacgtgcctgtaatcccagctactcaggaggctgaggtaggataatcgcttgaacacagaaggtgaaggttgcagtgagccaagatcaggccacttgcaatccagcctgggtgacagagcgagactccatctcaaaaaataaataaataaataaataaataaaatataaatgaccatgttttaaagttgaatttaactttcaaggaattaatctgtaactaaagaattatcttccctgtaagcattcactcagtatttccccaaggaactcttgtcctccttaagtacaaaacttttattacttttttcattagtctatattgtgacttcatggtaatagttacgaagttgtcagaaacaaagtaattattaaaagaatgcattaagataaaccatttttataaataaaattttgtatgtaattttattaaaataccaaaaataatgcccagaacaaatatataagagaaaaaccagaataaatctaccaaagagtttggccttgaatacaaacttctgcaaagtgtcaactccaaactgacatgagaaattaatccatttggagggctatgtggggtttttcggttcatttttggtttagagagagggtctcgctccctttttcttgttgttgttgttgttttttgagacggagtttcgctcttgttgcccaggctggagtgcaatggcgcgatctcggctcaccgcaacctctgcctcccaggttcaagagattcacctgactcagcctctccagtagctgggattacaggcatgtgacaccacgccgggctaagttttttttcttttttcttttttcttttttttgagacggagtcttgctctgtcgcctaggctggagtgcagtggcgcgatctcggctcactgaaacctctgcctcaggagttcaagcgattctcctgcctcagcctcccaagtagctgggattacagacacatgccaccaggcccagctaatttttgtattttcagtagagacggggtttcactatgttggccaggctggtcttgaactcctgacctcgtgatctacctgcctcggcctcccaaagtgctgggattacaggcatgagccacagtagagacggggtttctccatgttggtcaggctggtctcgaacttccaacctcaggtgatccacccacctcagcctaccaaagtgctagggttacaggtgtgagccactgcacccagcccgccattttttaatggtaatagttcttggactatgacatttagaactaaaataagccaggtgctgtggcccagacctgtaatcctagatagtcaggaggctgaggcaggaggatcacttgagcccaagagcttgagaccatcctgggaaacacagcaagacatcgtctcaaaaaaaagttggttttttttttttcatgctgcttttcttgaagaaacagagacacgctattactaaagtatataaagattttaagcccactcttttttttcttttgagagggagtcttgctctgtcacccaggctggagtgccagggtgcgatctcggctcactgcaagctccgcctcccaggttcacgccattctcctcgtctaagcctcccgagtagctgggactacaggagcccgccaccacacccagctaattttgtttttatagttttagtagagacggggtttcaccgtgttagccaggatggtctcaatctcctgaccttgtgatccgccccccttggcctcccaaagtgctgggattacaggcgtgagccaccgcgcctagcctaagcccacttttgaaaagaatctcacctacagttgctccttcatatccatgggttccatacccagagattcaaccaaccgaggatacaaaatattcagaggtcgggagtggttgctcaagctggtaaccctacgactttgggaggccaaggcaggagggttgcttgaactcaggagttcaagacagcttaggcaatataatgagaccttgtctctactaaaattcaaaaacaattggcagggcgtgatggctcatgcttgtagtcccagctaccagagggctgaggtgggaggatcacttgagcccaggaggctgaggctgcagtgagtccgaatcatgccactgcactctagctgggcaacagaacgtgtctcacaaaacagaaagaaagaaaatattcaggctgggcatggaggctcaaacctgtaatcccagcactttggcaggctgaggtgggtggatcacttgacgtcagttcaagaccagcttggccaccatggcaaaaccccatctctaccaaaaatacaaaaatgagccaggtgtggtggcacatgcctatacttatagctacttgggaggttggggcatgagaatcacttgaacctgggaggcagaggttgcagtgaactgacatggccccactgtactccagcctgggtgacagagtgagaccctgtctaaaacaaaacaaaaccaaatatgcagaaaaaataatggatggctacctctgtaccaaacacgtacaggcttttttttttctttttttgtcatcattccctaaacaatacagtgtaacagccatttacacggcacttacactgtattaggaattataagtaatctagagataacaggaggctctgcttaggttacatgcaaatactacaccattttatataagaaacatgagcatccttggatttcagtatctgcagggggccctagaaccaattccccacagacaccaagggactcctgtccttcaaagagccatataagctaaccagcaacaacaacaaaacaaaattccacctaatcaacttcaccctgtttcatacaattccaaccttcccgcagaaagagaaatacagtatttagagatactgaagcatttcacactgtacaacagcactggatagtataatgcttcctgtttattttaatgtaattttttaacgcaatagaatgaaatacacattagattgctttttatttcactatgtagtaaatattttcacttcatagaagtcaacagggaaaagtgttctattgttatagttagtaagaaatcccaatataaacatttaaaagagcttctctactagaggaaaatcttttcaacaaaagactctgcttcaaacaaaacaagactactagttacagggccattgcggttggggggcgggggaaacgaggggaaaatatatttaaactgaggtcctagtgaaaaaccaagaatattaccaaaaaaaaacccacatacacacaaaaactattaaaactaagaattaaatctacccatcaaaaaatagtaaacataaagtaagtccaggggtttatgtttctactgcacatagtaagcacttcacagttgtcagcaatttcctaataatcatacatggttctatacacaacctcgaaatggcaacattattaagttttaatacatataagcgaaagtgtacaaacatttcccaaacaaccaaaccaaaacaaataaaagtctggacttcatataatgcaatccaagtttctctgagaaaatgaaaaagtttctgatgcaagacaacatggagaaaattaaaacaaaacatatgaggcagaaaaggagttagtacacatacacgaattattttttaaaagatttttttttttttttttttttgagacggagtctcgctctgtcgcccaggctggagtgcagtggcgggatctcggctcactgcaagctccgcctcccgggttcacgccattctcctgcctcagcctcccaagtagctgggactacaggcgcccgccactacgcccggctaattttttgtatttttagtagagacggggtttcaccgttttagctgggatggtctcgatctcctgacctcgtgatccgcccgcctcggcctcccaaagtgctgggattacaggcgtgagccaccgcgcccggccaaaagatattttttaagccaggcatggtgacatctgcctgtaatcccagctacttgggaggctgaggtgggaggatcacttgaacccagaagttcaagacaccctaagcaacatagcaagacccctacctaaaaaaaaaaaaaaaaaaaaaatcctaactttttactacactccaagataaattttgggtgaattttaaaaagttaaacactagaaatatgaagtcataaattagaattgtttttcagatatatgtaagagtaaaaatgtaaaacttcagaagtgaaacagaaacacaacaattggcagatctgacatatacaaaattttaactcatacacattaaaagtagcaatacaaaacaaatagcaatgttaaactaactggagaaaatacttgcagcaaattagtgaaatagttgattaaattcaaggtacttattaagttctacacaatgatttttttttaagagacaggttcttgctgtcacccaggctggagtgcagtaatcataactcactgcagacttgaactccctggctcaagtgattctcctgcctcagcctctcaagcagctaggactacatgcacttgctaccatgctcagctaattaaaaaaaagattttgtagagacaaggtctcactatgttgcctaggctagtctcgaactcctgcctcaagtaatcctcccaccttggcctcccaaactcctgggattacaggtgtaagccagcgtgcacagcctacaaaataattttttttttttttgagacagagtttcactcttgttgcccaggctggattgcaatggccccatctcagctcactgcatcctccacctcctgggttcaagcaattctcctgtctcagcctctagccagaaaagtaaaagaaaaaattataaaaataaaaagaatttttttaaatgtttaaacaaacacatctttaagaactaaaatgatgacaacaacaaaggacaaaaagacaatgaaaataatgaagaaatacaactaccaaaaatgggaaaggttctactttgacaccaatccaaaaaaaaccaattaaaacaagctaccattttagattactcaattagcaaagaattttttgcaaatgataataccaaatgctgaaagggttttagtaaattaacactcagattccactttcaaaaaattatttgaggctggatgcaatggctcacacctgtaatcccaacactttgggaggccgaggcgggaggatcacttgaggtcagaagttcaagaccagcatgggcaacatggcaaaaccctgcctctacaaaaaaaaatacaaaaaaaattagctgggcatggtggtgcccacccaaccactcaggaggaggctgaggtagaaggatcccttaagcccgagaggtcgaggctacagtgagttgtgatcacaccactatactccagcctgagtgacagagtgaaatgctactgtctcaaaaaaaaaaaaaaaaaaagaagaaaagagaaaaaaatacattttgagcagcaagttgtggtggctcaatgcttgtaatcccagcaactgggaggctgaggcaagagtgtctcttgaggccaggagtttgggaccagcctgagcaacatagcaagatcccatctctaaaaaaattaaaagtagcaaggcatggtggctcatgcctataatcccagcactttgagaggccaaggctggaagattgcttgagaccaggaggttgagactatcttagacaacacagtgagacccccatctctacaataaaaataaaaataataaattaattaattaaaaacaattagctgggtatggtggtgtgaactcatagtcccagctgttccagaggcagaggcaggaggattgcttgagcccaagagttccaaggctgcagtgagcaccactgcacttcagcctgagcaacaggggaagactctgtctctaaaaattaaaaaaaaaaaaaaaaaaaaaaaaattaaatggccgggcgcagtggctcacacgtataatcccagcactttgggaggccaaggcgggtggatcacctgaggtcaggatttcaagaccagcctggccaatgtggtgaaaccccgtctctactaaaaatacaaaaatcagccaggtgcggtggcacacgcctatataatcccagctactcaggaagctgaggcaggagaatcgcttgaacttgggaggtggaggttgcaataagccaagactgcactactgcactccagcctgggcaacagagcaagattctgtctcaaaaaaaaaaaaaattaaatgaaacacatgtataaatggccaacatgcacatataaagggtgttcaacatcacttagtcaaggaaatgcagattaatccacattgagatactactttccaacaatcaggatggctaaactgaaagactgacaatatgaagcaccagtcctgcaagctcctttcatgtaagtaaaaaggccacatgagacattagaagaataaactgccaacaactcatagtcttgaaaggagacttaggcaagtgacagtgttcagggttgaattagtgataaatacttagaatactaagcaaacacaaataaaatcagtcatcagctccaaggaaaacaaacattgtgctagaaaagtaatcaaaacttactacctaatttcagctgtgaatcctacgcatatgctcataaggtaaacatttaacagttatctaaaattaccatataactattgcggtaggattaagtaacagggagaggggaaggggaagtggctaaggtggaaggaagggagagacaactaaattctcatgctcagaagtgggaagtcaacagataatgctgaaactgaaaaatcaataccaaataccaaagatcaactaaaagaatacaaagtggtctcctctaagagaaggaaaatgccaaggaaaattaaggagctggttgtcatttaacaaatcctggtcaagctattaacactttaaactacagttatgcatcacaaatgacaggaatgcatcgttaggtgatttcatcattgtgcagacatcagcgtgcttacacaaacttagatggtatagactactacacacctaggctatatgggatggcctattactcctaggctacaaacctacacagcatattactgtactgaatattggaggcaactgtaacacagtatttgtgtatctaaacatatctaaacatagaaaaggtatagtaaaaatatagccttaaagataaaaaaaaaaaaaagtccaggcacggtggctcactcctgtaatcccagcactttggaagactgaggtgggagaatcacttgaggccaggggtttgagaccagtctgggtaacacagtaagaccccgttctctacattaaaaaaaaaaaaagaaaaatttcccaggcttggtggcatgtgcctccaagctactgaagacattgaggcaggaggataacttgagcccttgagcccaagaggtccaggctgcagtgagctatgatcatgccactccagcctgggtgacagagtgagaccctgtctaaaaaaaaaaaaaaaaaaaagacaaaaaaatggttcacctaggctgggcttggtgactcacatctgtaatctcagagctctgggaggccaaggcaggagacttgagcccaggagttcaagaatagcctggctaacatagcgaggtctctacaaaacataaaaaacaaaaaaatcagccaggtatggtggcatgcacccatagtcgcagctactctataggctaaggtgggaggatagctagaggctaaagtgggagacaatctcttgagcccaggagctcgaggctacagtaagccatgatcacgccacttcaatctaccctgggtgactgaacaagaccctgtctcgagacaaaactaaaaatctttttttaaaaaaggtacacctatatagggcacttaccatgaatagagcttgcaggatgagaagttgttctgggtgagtcagtgagagacttaggggtgagtcaatgttgaagtcctagccctaggacattaccatggagtactgcagtagattttataaacactgtgcaattcggttacaccaaatttactaattttttcttcaataataaattaattttagcttactgtaattttttttttttttttttgagaccaagtcttgctttgacacccaggctagagtgcagtggcacgatcttggctcactgcaacctgcacctcctgggttcaagcaattctcgtgcctcagcctcagcctcctgagtagctaggattacaggcgtgcaccaccacaaccggctaatttttgtatattttaggagagacagggtttcaccatgttagcctggctggtctcaaactcctggcctcaaatgatccacccgcctcgtcctcccacagtgttgggttacaagcgtgagccaccatgcccagccagcttactgtaacttttttacttcataaacttttaaatttaacttgttggctcttataataacccttaccttaaaacacattgtacagtgtccaaaaatattttttctttatatctttatttaaaaagtttttactattcatgttttattttcctttttaagctttcttgctaaaaatgaagacatacactttgggaggccgaggtgggcgtatcacctgaggtcaggagttcaagaccagcctggccaacatggcaaaacccatctctactaaaaatacaaaaattagctgggtgtggtggcatgcacctgtaatcccagctatttgggaggctgaggcaagagaatcgcttgaaccagggaggcggaggttgcagtgtgcagagatcacaccactgcactctagcctcagggacagagtgagactctgtctccaaaaaaaaaagaaaaaagacataaacacacaccttagcctaggcctacacagcatcaagatcatcaatatcactgtcttccaccttcacgtattgtcccactggaaagtcttcagggcaataacacacatggagctgtcatcttctatgacaataatgccttcttctgaaatacctcctgaaggacttgcctaaggctgttacagttaagttttgtttttttttttttgagacagagtcttactctgtctcccaggctggaagagtgcactggcgtgatcaaggctcaccccagcctgaacctcctaggctcaagtgatcctcccactccagcctcctgagtagctaggaccacaggcgtgtgcctaatttttgtattttttgtagagacaggttttcaccatgttgcccaggctggtctcaaactcctgggctcaagcaacccacccaaaatgctgggattacaggtgggagccaccacgttcagccaacttttatttaaataaatagaaggagtatactctaaaataatgattaaaggtatagtatagtaaatgactacataaaaaaagcaaaaagcaaaaacaagtaaatggctacgatgtcactaggcaataggaatttttcagctctactattatcttatgggatcacagttgtgtatgcagtccatcgttaaccaaaacatcatcatgcagcacatgactgtataggtatgtataacatggacagaaacagacatctcagaaaaagcaagatacaaaattttatgtacattatgattaaaacaatactaaacactaatttgaaaaaagagtaacagcaaataattagctgtgtttggtgatgagatcattagtgaaattttctccctttatcttccaatctcttagtaatcttgtatattgttttttgtaatatttaaataagttttacaaaagtgctgttggtggctggtagttgatattcctgtttgtctttgtttatgaagctccctccttctctgtggataccacgcttcttcttaccctatatatctataaccaactgtgagagagtttttaatgttttgacaaaaaattttaaaggtcacacagaacaatcataatcttttccactgattactatgatccctttgaatagtctcagcttgcatggtcatttttacagtcccatactactatgcaaactgagaaatgactacatataatatagatttactctctatcttagtaattttcatctttatcattgagtacttaaaggaacgtctacaatgcaccataaaccatacagcagaatgttagaattttcactataaaaccaaacacgtcatatatgcacacccatgaagtgtacaaacaatacatactaaattatctcttaacactatttttcctttttctggtgttttgttgttgtttgtttgtttgtttttgtgatggagtctcgctctgtcgctcaggctggagtgcagtggcacgatcttggctcactgcaacctccgcctcctgggttcaagtgagtctcctgcctcagtctccccaagtagctgggactacaggtgcatgccaccatgcccagctaatttttattgtatttttagtagagacgaggtttcaccatgttggccagggtggtctcaaactcttgacctcaggtgatctgcctgtctcagcctcccaaagtgctcggattacaggggtgagccactatgcccggccaaatctttaatttctaaactaatttggaaagacagaaaaatttgtatcttcctatgtgtgtaatcaaaaaatagtagtcaaaatattcattgcattttcactgtcactcaatcttttgccaattataatctaattttttttagtttttgtttttagagacggggtctcactcctgtcgcccaggctggaatgcagtggcacaatcatggctcactacagcctcaaatttctggactcaagaaatcctccagtctaagcttcccaaggagctgagattacaaatgcgagccactgagcccaactataatccgattttttatttgtatatctaattattaaataattttatatataattgcacaatatatattttatgaaaagtaacggtttctaagatgaagaaaatctaaccccttccatgagttccagtatcttattataactacactaagctacaataatagcttaatattaaacattaatgtttcttcgacctaaggaagctgatttttaaaaataataaatattaattttaaacacagtattaaagtattaataatcaaacaaagccacgcagtgaaatgacatttgaattttgggaaattttctttttttttccttttcttttttttttgagacagagtctcactctgtcgctcaggctagagtgcagtgaggcaatcttggctcattgcaacctctgcctcccggattcaagcaattctcctgccttagcctcccaagtagctgggattacaggtgcctgccatcacgcccagctaatttttgtatttttagtagacagggtttcaccatgttggccaggctggtctcgaactcctgacttcaagtgatccgcccgactccacctcccaaagtgctgggattacaggttgagccaccacacctggtaagaatgttgggaaaattttttcatactaacacattggcatatcagttatcagttggataaaagttttcttctatatatgaagttataaaatgccactgcccagagacaaaaatcttctgaagaggtattagatgaatggctgacaacatcgaataaaaacgcacaaagaacattgtcataataaacttttgatatccaaagggctacatttgaggggttatatacctaaaagaaacctttttcggccaatatttacatcccccttaaactcacctactactctctctatatatatgcccattaagataggatatcttctgagaacctgcctccagaaataaagtctttaaaaagtttgggccaggcacgtggttcacgtctgtaatcccagcactttgggaggccaaggcaggaggatctcttgaggccaagagtttgagaccagcctgggcaacacagcaagacctcatctctgcaaaaaataataaaaaataatttttaaaagtttaaaaatatagcatttcatttttaaaagtgcctacaaaagcagaagattttaaaacatataaatgtcacttgcatcactaaatacccacttaaccttcgaacagtctctactccaataacacacataacaaataaaccctaggcccttacagcaattgggctaagaaaggttaaatttcagaattcataaagataggaggcatttctcattcttatggtagagactacctgctgtcgtctgtgtacatgcttacaataataaaggccaaccttttattaatgtttgctaataaatatcctcctgattttccattccagctaagatttgataatataattgactcttccgtgttttcatcacaagcagcactgttacagatatcatttcctcttaatttatccacaggctgtgtgaataatttagaaaattattttcaaaggactctatctagggaagtcttttgggttttagagtagggttctttctattctggttttctgcagctgtggggtcactctatcagaatttcatggttataccctttgcacaatctgtaacattgtttaagttcaaaactacatacattatttcatcaaaattaaaaacttttgggcattaaaagatcctatcaagaccatgaaagacaatccacagatattaatatatctgtaacccacagaaatatttgggagaaaatatttgtaaatcatatatctgatgtgagaataatatccagaatgtataaagaactacagaactacaactcaacaacaaaaaagcacacatctcaattcaaaaatgggcaaaggattgaatagacatgtctccaaaaaagacatacaaatgaccaatagcacattaaaaaaatgctcattagcactagccattaggaaactaaaaatcaaaatgacaatactatgtcacacccattaggatggttattaattgaaagaaaacaaaataacaagtattgggtagatatggagaaaatggaaggagcacttgtgcattgctggtggaaatataaaacggtacagaagctgtggaaaccagtttagctgttccttaaagggttaaatatagaattaccatatgacccagcaattccattcctaggtttatatccaaaagaagtgaaagcaggactcagacagatatttgtacaccaatgttcacaacaacattattcacaatagccaaaaggtggaaacaactcaaatatgtcccatcaacagatggatgtacaaacaagatgtagtatatacaaattattcagtcaaaaaaagaaattaaattctgctatgtactacaacatggataaaccttgaaaacattatcctaagtgaaataagaaaggtcaaatattgtacgattctatttacatgaagtatctagaataggcaaattcataaaaacagaaagtagaatagaggttaccaggggctggggaaaaaaagggatagagaatttctgtttgggatgatgaacaagttctggaaatggatagtggtgatggttatacaatattgtgaatgtacttcatgccactaattgtacattttttaaaatagttcaaatggtaaatggtatgttctatatatatatatattcacaataaaaataaaataaattggcaaagccaggagaaggtgggggagagctatgtacatacctgagtttgtgaagatcagacaaaaattcacatgaactattttgaaagtcttttacaataatcctagtaagacatagttgaaaatataatactgatcatgactaagccataatcctattgcagtcaaaatcataatttagtacaattttttgctttctcaaagatatgagaaaagctgcatacatgtatttgtatactagaaaaacataccttttagtaagggttttacagcaatgcaaatgtcaaagtagcactggcataaattgaggcaaatagttttttaactagtaggagataactgtgaaggacttagtaaatgtgaaaactttgaaaagctgaaaaatccacctgtagtattttgacttcactgacatagggaaatgcacaaacatctactacattccagatttagggactcaggatactaagataaacagaaaaagtctaccctttcaaaagtttagcttatctctgccaggatcacaagaggcactagtgaagaacagacattttgggggcattttcaaattctcaaactgacacaaatacatgagatgcgcaaaagtcttctaaattacagtgtaacctacaattgtctatcttctaataaattcttctaacacatagagaacttctgtgtagtgcagtcctctgagacctgtaattataaacttcagtcacattgctataaaattccaaattgggagtttgaaatatgagccacatgttacttaacgttcagaagacgtataaatgagagcaaaaggttatggcttaacagaaaactaaataagaaataactattgatttttaaatagcaacatatcacaatcatacagacacaccaatgactgtaaccatatggttctctcaatcatcaagcatatgctaaatttgtgcttaaaacagtccaatgtggttttaaaaaaaggttactcttcagcagctttcaatctagttgggagagtaaattaatacacataaaacatgtgttatttatgtacatatatatgtaaaaatactcaaatacaaaggatccaaatgtaagaattcaaaggagataagtaagttcaggaaagctccaaagaaggtaagatttaggcaaagtccagaaggatagacagaattgaatggaaatgaacccttcataatctaacttcatcttgcctttccaacacattgtacaatacaaaattattagaatagataaaagcagtctatggccataccaacctgaacatgccaatctcatctgatctcagaataaaaacaaattagaaaagaagctaggtgcagtggctcacgcctgtaatcccaacactttgggaggctgtggtgggtggatctcttgagctcaggagttcaagaccagccggggcaacatagcaaaaccccgtctctacaaaaaaacacaaaaattagcagggcatagtggtgcacacctgtagtcccagctgctagggaagctgaaataggaggatggcttgaccctggggagttgaggctgcagtgagcagtaaatgtgccactgcactccagcctgggtggcataaaaaagtcattccagataagagaaatcacagaaatatgaaataagaagagcataataattagcccacttaatgcttattgtagagaagtggttaaatattttacataggaatacacatgtcaaattatataaattacatgggagaaaaaaagctcctaaaattgcatggaattttgacatgactttccaatgtaccctattcatacccactactcatttgctatttgagagaaatgtctcagaaccagtcaaaccaaggctcaccttcaaaaccaggtgggcacccaaattataataagaattagaaatttgtgcttgtccttgcatataaggctgtgtttcatttttccttcatatttactactgattgcttcatgaattcagataatttcagagccaggaggcattatttataacccaaattttaaatgtttatattcctgaaacatttgaatatttgcataaatgtcatgagacaaaatttactctagaaagcacaatttaccagattactgctgctagttgtattctgtcagctttctcctttaaggagaaagcacagcagcactaggtagtcccatttattacgtcaacattttaataaggccaggcactgtagcccacacctgtaatcccagcactttgagaggtcaaggccagaagattgcctgagttcaggagttcaagaccagcctgggaaacaacagtgagattcccgtcactacaacaaaataaaaaaattagccaggtgtggtccacacatctggagtcccagacacttgggaggctgagatggaaggattgcatgagcgcaggaagtagaggctgcagtgagccatgatcgcacaactgcactccagctagggtgacagagggagaccctgtctcaaaaaaaaaaaaaaaaggtttttatctgtcccttggactatttgcctcctactcctccaattcattctttgtatttccaatagaataatctttgaaatgcacctctagtcattttactcaggtgctcttcttcagtggaaggtacgtatgccctatggtttgaagtcagtcgtttcagcatggcaagccctagtagtttctatgatttggtccctgtctgaacactgtgtacccttgcaaatgttgctttctagatcttgaaatgttctgcatttccacaggttccccctcttatctctcctattacttacgtaaactgtacaaatcttactatatagcttgactgaatttttagggatgcatccaaggaattatcctgcaaaattaagatacagaacatttccagcaccccagtaggctctctcctgttctctcccagtcgataccgaccctcagaggtcaccactattctgtcaccataaattagttttgcctattttggaacctcatatatacagtaatgcaatatttactttttttgtgtgtatgtgtgcatggtgaactcatttttaagaccaaattttatgcatcttctctgtgaagcaaaaccctgacaagatttagtgtcttgaaattagggccagtgtatgatttctatttccagaggctggcatagtgagataagctcaccggcaaactgccatgtatctttcccctcgaactacctgccttgccagatccttatctgtcaaaactaagcccagatgtcaagttctctcagaggcctccgccagccagcacagtggctcatgcctatgatcccagtgctttgggaggctgaggcttgaggccaggagtttcagaccagcaacacagtgaggcttcgtctctgcaaaatttaaaaaaattagccaggtgtggtggtgcacacctgtagtccccacaattcgggagacctgaaccaccatgcccagctaacagtaccattttcataacaagccctgtattcccatctgattctaaactatgtgcatataccattgtaataaaaacaaaaacaaaagactaagaaaagagggagggaagcattagccatggaatataagagaaaaagagtcttagaccaagaaaaaaaaagttaatcataaaatttaatttaaaatcacctggattatttagaaccaagagagagctctgtgtgttgaattttatataactctgtataacactttaagcaaataactttctaactctaacttcatatatggcagtaggataatacttgtcatcataaatgaaaagtacatgaaggtcatcatataaaaatgattatttcaggaataaaattattaaattttatacataaccaaaagacattctcaagtgttcataagtacaatacttaccccatactaatctcacaggaatttatttatcagcttcaaatatttgaactaaacagacaaaactacatactatatttaggactatttatttttaactatcatttaaaactttaagcacaggccgggcgcggtggttcactcctgtaatcccagcactttgggaggccgaggcaggtggatcacgaggtcaagaaatgaagaccatcctggccaacatgctgaaaccccgtctatattaaaaatacaaaaattagctgggcgtggtggcttgtgcctgtagtcctagctactcaggaggctgaagcaggagaatcgcctcaacccaggaggtagaggttgcagtgatcccaaggtcgcactccagcctgggaagcgacagacatcgtcccaaaaaaaaaaaaaaaaaactttaagcacaaactttttaaaagctgctgaaaggaaaagaaattttgaggtggatacatatagtataactcgattcctgtctttattttttaccccccgatctgacaaacatgaaagctctccacaacttctctccattatttatacatttatacattcatccagacatccaatatttactgagcacttaaaatacattaggcactgcacctatcctgacactggggattcagcaacagacctgacaataaacgtgataattacgtattatgataaaggctgtacacaaactgttcagaatattgcacaatagtgatagacaaataccacttcatatgaggtgataaaggaaggcgtccttgaggccatctgagctgtggccatcagatatgagaatgagccagacatgtaaaaattcataaatagtctttccaggatgagagaaagtagcaaatgcaaaggctgcaagccagaataggttccaagaacaagaagatggctagtgtagctagtgtacaggaggcaaggggtaaattactacaattgaggttggagttttaagcaggaaccaaattatttacagccttgtagaccactataaagactacatttttaaaaattaattatagactttaaagaaaggaataacaagatctggtttggattttaagaatacactgactgtgtgaaactaggaaactactgcacagtgtcttggagcaaaagatgatggcagtggggactaaagtggaggcaattaagcagaagctaacagactaaactcaataccaaactaataaaacttggtgacagattctaactggagataaggggatatggtcagaaagtgagagaaagggaggaactgaggatatgtctagatttttcagtttagtacttgtgttgcaatagtgatgccatttgctgtcatgggaaagactagtggaggcctatcttgttagaaagatccttttcataatgtaatctctccagaccctttcacgagtcatcaccaaaaggcaaccatagcaaatgttaaaaggcttttgccacagggataagatgctggggcaaccaagcttctttacagaaatgaaagacactggacaacttcctctgtaaaatcccactttagcatagttttgcttttaatgcggtccagtgtctagtaccccaacaaacatgttataggcaaggtttcaaaacatcagttttcctgaatcttattcacaagatagtgatgagcgccgccctaggccaggcacggtggctcatgcttgtaatcccagcactttgggaggccgaggcgggcggatcacctgaggtcgggagttggagaacagcctgaccaatatgaagaaactccgtctctactgaaaatacaaaattagtcgggcatggtggcaccgtgcctgtaatcccagctactcggagggctgaggcaggagaattgcttgaattcgggaggcggaggttgcagtgagccgagactgtgccattgcactccagcctaggcaacaagagcaaaactccgtccaaaaaaaaaaaaaaatccctaaaataaagagcctggctgggcgtggtggctcacgcctgtaattccagcattttgggaggtggaggcgggtggatcatttaaggccaggagttcaacaccagcctggacaacacggcgaaaccccatctctactacaaaatacaaaaattagccaggtgttgtcaggcctctgagcccaagctaagccatcacatcccctgtgacctgcacaatacattcagatggcctgaagcaactgaagaatcacaaaagaagtgaaaatggcaggttcctgccttaaccgatgacattccaccattgtgatttattcctgtcccaccttaactgagcgattaactttgtgaaattccttctcctggctcagaagctcccccactgggcacctcgtgacccccgcccctgcctgcaagagaaaaaccccctttgactgtaattttccactacccacccaaatcctataaaacagccccatccctatctcccttcgctgactttctttttggactcagcccgcctgcacccaggtgattaaaaaccttcattgctcacacaaagtctgtttggtggtctcttcacatggacgcgcatgacagtgtggtggcacacgcctgtagtcccagctactttggagtctgaggcaagagaatcgcttgaaccaggagacagaggttgcagtgagccaagattgcgccactacactccaacctgggtgacagagcaagactctgtctcaaaaataaataaataggccagaagcagtggctcacgcctataatctcagcactttgggaggccagcgtaggtggataacttgaggtcaggacttccagaccagcctggccaacatagtaaaaccctgtctctactaaaaatacaaaaatgagccgggcatggtggtgggtgcctgtaatcccagctacttggaaggctgacgcatgagaatagcttgaacccgggaggcagaggttgcagtgagccaagatcacgccacttgcactccagcctgagcaatagagactctgtctcaaaaaaaaaaaaagaaaaagataattaaaaaaaattaaaaagagccttatgttaatgaatactaagtccctaataaagaggggtgttaaggaaaggtcttgaattctggtcatctttgaatagatacatcttaggatacatctctgactataaaagaaaattctattctattgctgcataacacacacacacacacacaacacaaaagaaacaaacggaaagaacaataaaggaaacacttgaaaagctagtttttaccaggcttttgtgccaataattaactacatacctctaacttccaagagttctttattattaaatgagaggacttattggaatgcagaaagacattaaactgctcaacttaaacacaaatatgtcatgaggcccaaaaagcaaaagcagaagcataaacaagctctgaaaggagaagccatgcttcccggatacagtataaaaagaactgtcagtcccaccttaatcttctcagtacactatccaactactaatttttagttcataaattaaaaaaaaaaaaaaaaaaatccctccaccactgcagctgtttaacattaaagcttctaattcaaactctcagcattactctggtgctgcaaaaacagatttttctctagtgacaacaaaaataataatcacttctctaacttttccaatgatccaagcatgtaatccagtgccaaaaatcttccttttctcgtcctgagaaaatatctggctatgggttgggcatcacaatcccaactctaacttccttacacatctttctggaaggcaaccctgagtgctgtcactgtaaagtctcactaagcacaaagagagacaatgaacaaggaaaaacaaacaagagctgtccagtttggtaaatggggagctcactaaccagcaagtgatgtcccctcattttgctcatcccccaaaatccagagttcatcaatatatttatctcctcttgtcagagacacaccaaacctacgaactaaagattagtgaggtgaaaacagtgaaattagtgaaacagtgagattagtgaaaacagcacctttgtaatcactcaggtgactacatataagcagactacttaaaaactgccccatttttctcctttacaaatagtaagatctggtatacttttaaaaggcttaaccgaaaccaacaattccaaactaatgctagaaagttcactggtgaattttaaaaattcataggaaggcaaataagtgctttaataagggagataaatacgcatcccagaaggtactgactgtgaaattcaatttccgtgtatagaatgatacattatgctaaacgaactaacatcacatcataggtagtataaatctaacgaaattttaagattaatactgagaaattggtgaacaaaatcttagttgggagtcaatgttttaaagcatcttagatttggtggataagcaaaatgaaaagtactgaattatcaactgttacatgcttaattattccactagcaaacacaactacctataagtgactaggaaattaaatcctttaacactcaattattgagcatatactataaaatgagcacagtgctagcagcacttctaggccatcagagacacccatacacactctgtatttccgtagcactttctcctatagcactgcagcacttaatataccataagctaatcatttataaatgatatgcatatatactacttttgaacatattatgtgcattattaaacatacacaagttagaactataaacagaatttctagtattttattcgcatcctctatgaataggcttacattctttgatacaacttacaatgagattacctcccaataaacccatcataagttgaaaatatcattaagtcaaaaatgtatttaatacaccaaatttactgaacataacttagcctaccttaaacatgcttagaacacttacattagcatactgttggacaaaataacacagtaatgcattgaaaatctcatgtaatttattagtgtactgaaatattaatactatggttattaatactaaatattaatactttactgaaatatgatttctactgaacgcatatagcttctgcaccatcgtaaagttaaattgtaagtcggggattgtctatatacacttagtggagatcactgacccaagctatatgatcctagagagaggggtcttggttatccatttccttagtgcctaattcatacccagccttcagtaaaaatctgctgaattaatgagcaaaaggacattttaaaatatgaatccataacataactttttgacacactatagttcatcactcagctactaagagcaatataaatgccagattttaaagaaagggattagaagaaattcacccactgtattttattactacaatttaaaagttaagaatcattttaattcagccgattcttacacacacacacacacacacacacacacacacacatcgccttataatcctgtttccagaaagatgaaaggaaggacagagaagcagataagacagaagaattaaaaaactggtgaagatttttaagatgtcttagagttctaaaaggatctaaaatgcaactcatctttcaccgaacggtttttgaatgctgtgttccaagcatttaaaacacgtttttaagaatacacaagccacaaacttagatgcaacaaggaggtgaaataaagagatgaagaatgtgctgctcaaatttccagtatccatgaagtacaagtgtacttccttagaaaacacacgcaatataaacaagagtcaaggctttccttgtgttttactcaaaatatttaagaaagatagattcaagccaaaaaataaaagctaccagtaatacatctccctaacagtgtttaaatgtacacttttagaaaacgttaaggtttagacaactgacaaacagtctagctaaaatagtgtgcaaaaaccaatcttcctaatttctaggtgcttctaaaatgtaactgaagtcactagactgcccttccactcaggcccagtaagtgttatctgtcattaacataacacttcgtttccaaggccccgctttgcaagataaactgcctgcaattccatgtttgtatgtggtaatatatgcctatttttttaaatactacctgtgtctaggcattatttagcattcaataattttaagtaaagccaaggaggcaagtatttctgtagttttgtcaagcttgttttgcacacactggactaatgtgtgtttgtcaaatcctatctaccctttcccccattcattttatacaatataaacaagtagatgaaaccaatgaatgcaggttttaccaactgtttatattattcaagtgcccaaaagaggttccaagacatttttagctctatcaaaagattctggggacagccgcagtggctcacctgtaatcccagcactttggaaggccgaggctggtggatcacctgtggttgagagtttgagaccatcctggctaacatgatgaaaccccatctctactaaaaatacaaaaaataagccaggagtggtggcatgcgcctgtagtcccagctactcgggaggctgaggcaggagaatggcttgaacccgggaggcggaggttgcagtgagccaagatcacgccactgcactccagcctgggcgacagagcgagactctgtctcgagaaaaaaaaaagcttcataaactttttttgtaatcttaaattctatattaaagtctgacatttactaaatggaccatgcttaaagaagggggcttctggtttacatttagaaatacaattttatcaacttgctgctctcttttgctttaattttcctctaaagcaaactggtaaaacataaattcatgccggccgggcgcggtggctcatgcctgtaatcccagcactttgggaggccgaggcgggcagatcacaaggtcaggagatccagaccatcccggctaacacggtgaaaccccgtctctactaaaaatacaaaaaaattagccgggcgtggtggcgggcacctatagtcccagctgctggggaggctgaggcaggagaatggcgtgaacccgggaggcggggcttgcagtgagccgagatcgcgccactgcactccagcctgggcaacagagcaagactcgtctcaaaaaaaaaacataaattcattccaatagttacaaataagctcttaacaaagattttgctatctcttcaaatacatgtgttttaaaattcaacaggcagacactgtataagaaattaaacaaaaaccttccagtcagatcagtttaaaatgcaattaacttcatttgtatttacaaacgtaccatcttagtttgataggagattaagcaggctagagctgaatacaagtttaattttggaatttctcaatgccaggtacatcactagtattcacaccctcaaacttaagaaacacttctgaaccttgaagctgtaaatcagtttgactaatgtcctctttcatgccatgtaagccattgcctaattgaggccagacctgtcaggctcaacagcatcccggaaatgactagcctactagggctggaaacacatcaagaatttggaatatttctcatattggggcagacaaaaaaagttcaaatgagattgtccataaaaacaattattatactgttccacaagggaaaaagaaagaaagacataaaaggcatatctgtgttattctggtaaatccaccaccaccaatacatctcaattctgtatcttactgtcaggtgatggtcaactgaacttacccacttacccctcttcttcctatatacgaacaagagttcacttctcaagcctcattttgaatacccgtcttttaatctaattaccattttatatccttagctactaaaaccacctggagcatggctgatttcttgacttggaaacctgttaacaataatgcctagctcctaatcttcttaatgttttttcacttcttaccaagaatatccattaaatgtctaaaagaaatacaagcatacacagatctacacacactgaaatcccagtcatgaaaaattaagacattccggccataaactgtgcaacaagacacttccagttagtgtgtgctttagtgatcatggacagcggtatcagagtgagtggtagggggttggggctgccaacaatatactgtgcctcagagccaataagcagcaggccgggactggcagccaggccagtctctaaagggagatttaacacaatatctgaatgctggacttcccaatgccatttcatggagagggatggagcgagaactgggcatcaagtgcagtcaaaggctttggtcaacgtcggaggagatgaaacctaagacaaggtctggtgccaacgccagctgtccagtctcatctcacctcaaacacaacttcatttcagatcgttcttatcaaagtcagccgctcaaacggtgaagggtggcagaagcggatggccacagccctcaagagacaggcataggctctgggaaaaggcagggactccccagatacgaaggggcttccagtagcagagaggagcgctttgcagccgcctcctcgtccccttccagctaaggctgttaggaacgaggttaggatgttatttgaggtttttatgaaggaatgataggagaaaatggcaatgaaggatgaggggggctggatgggctggagccgcccaagaaaacggggagaggacttccctggacacatccaggatcacaacgccaccagcgagcacgggcactgccctgccagcgccgatccccctctctcaggacaagcccctttccaaacggccctaattcccaaacgctgcttcccacccgacctctctcctccaccacactccccaaggccggccgcctttcccttccgcctcaggcgccccacgccctcaatctcccctctccctcccggttacccaccctccaggctgcccgtcgcgggcctcccaggcagctcgcccagacccctcccccctcacctctcctcagcgcctcctcgtagctgaggaatccgatccgtgactccttggcacccatgctcccctcatcccctcggcggggggtcggagcctgatctcgcccccacccccctcccgccttctcctcggcgtccctgggtgacggtgacggtgtcggcgtcccccgcccccacctccccccacactaacaagtgcggcttctgccccggcggctcctcccggtcgccgccaccgcctccatgccggatcacgtgactcttccgccccgcccccttcccctgcctcctactccgcccttctctctcctctctctcctccctctccttccctcctcacgccctcttgccacttccgccccctcccgccagctccgccgagggtcacgggacccgaggccagacactgttcccggtaacggccgcccagggccgcacgctccgcccctccccaagctaaccgcgcgcaggagcgccggggagggggacgcatctccgcacgtaacgcatcgtcccatcttcccgccaatcgcagccgcgcgccccgcccgggcgcctccgctggcgacggggggtggtgacttccggggcgcttgaggacgaccccccccgcccccgcgcccacatgttctggcgttcggcgggtggggtccgagcagctgacggttagtgtggcagttgccgggacctaacatggaagaccgcagaatcttagggaatggggttctgagggatgcggcatatggctcagaagagaaaggagtgggtaggcagggagctcccaaccttagggacgtctttgactgggagggcgttgtgaaaggaaaggagaatctcaaggctttcctgtgacaaaagaatgctcacacctagcgggagatccctgaggaaagtggaccttgttaacgaagtggatctgccttttcgggtcatctcgcctgcccggcccaccttctcctcctgaccatgcctcttgtacacattctctggaaagcgctgtgcaaaaggcttatcctctctcccagagtttctccccgagaaacatgagggctacaaggcttagcgtggagtcgttttaatctgtggtaaaatatacgtaacaaaatgtaccattttcacaatttctaagtgagttcagtggcgttaagaacattgatattgttttgcatccattgccacgtcccatttcccaccgtttttcatcttgcaaaagggaaactctgtgcctattaaacggtaactccccaatccccctcccactggtccgtggcaaccgctgtcctactatcaatttcactactcttaagtatttcctctgagtggaactctgcagactttctcttttgtgactggcttatttcacttggcatcgtgccttccaggttcatggtgtggcagcatgtgactgactctcccactccacctctccatttcccaaagaatgaaaagcagggatgtgaacaggtatttgtgcccccgtgtttatagcagcattattcacgagagccaaaaggtgaacacaacctataggaaaccataaatggagaaaccaaatggggtgtatatgtacagtggaattattatttagttccttgattttcaactcttatttagtttgcgtcttcaacctaaaagtcacggaataaagcttctggaaaaggaagcaatattgaaaaagtaaccatttggattagattggacccaaggtgccggttaggtaatttagggccagggaaaggttattagttcctaaaaccaacagattctaatataccctgctagagaaagaaggtaatattctgtgtttttcttttttttttttttgagacggagtttcacccctgttgcccaggctggagtgcaatggcgcgatctcgactcaccgcaacctctgcctctctggttcaagcgactctcctgcctcagcctcccgagtagttgggattacaggcatgcgccaccatgcctggctaattttgtattttcagtagagacagggtttctccatgttggtcaggctgttctcgaactcgcaacctcagatgatccgcccgcctcagcctcccagagtgctgggattacaggcgtgagccaccgcgccccaccaatatttcgtgtttttctactcacctttcctggcaaaccagatcagcagcgtggcattagtcacagcgctgccctttccagttcactgtgaggtggttaattttaagacctcagattagctgcattactgaaaggccatgaatcagggggttgggaatacatttcaaagcctttaatttccaggtcattagttcggtatagagagacatcaggcaaaacacctcagtcatcttcagcctgcagagtgcgagttccgagttagattatcgtaattaatgggaagtgaattttatgaaagggcccagctgtgagggagaaaaaccctcaagagttcaattgcaacatatactactattattactgtcctaaaccgtcagtacctacagatggccttgctatacaagggataggcttgggtatttatctacccacttgatttgcagtggagttgggagcaaattaatgtatctctttgtggcacttgccccacttgaaagacaggactagagttgcagtttagctgctttcatgagatggtaaatgatttacaaaatactcaggaattaatagaatatgaccgcatgtgtcgttttccaatggggtgcattctaagagatacattgttgtggtgcaaatatcatagattacttacacaaacctaaatggtatatcctgcagcacacctaggcctattgctcctaggctacaaacctgtatagcatgttactgtactgaatactgtaggtaattttttatttatttatttatttatttttttgagacggagtcttgctctgtcgcccaggctggaatgcagtggcgcaatctcggttcactgcagcctctgcctcccaggttccagtgattctcctgcctcagcctcctgggtagctgggattataggcgcacaccatcccgcccggctaatttttgtatttttagtagagatggggtttcaccatgttggccaggctggtctcgaactcctgacctgaggtgatccaccaacctcggcctcccaaagtactgggattagaggcacgagccaccacgcctgggctacagtaggtaattttaacaatggtatttgtgtatctaaacatagaaaaggtacagtttaaaaagcagtgtaatcttacatgaccaccatcatatatgtggttctcctttgactgaaacacgactgtagctcatgactgtatgaacttattgtaaagtaagatttacagcagtactaacatgaacttttaagatttcctctttaagtttcaggcctggcatcccctaaggtcataaaaatttccactccatggattaagcacttctaaaaattgtgagttgagatagcagattaagaaatactatttctcctttgtctgagttaaattaagcatattattgtagccagtgaagcagatagttgtgtctgatgggaattttaagtgttaaacccagattaaaacctgcattttggtttgtattacacagtagcagggagtcaaatgttaaacatccctctaaaacttaaaattgatgcagtacttaagtctaataacgtagaaagtctgaagtctgcttgtcatgctgaaaggaattctattaatcgtttagtttgttcaatttcattataattaacttaatccattgaagagttggccagccacctcacttttaagtagtcagttgtacttaggaaaccattgctttaactataattacatgcctgcaaaagggttatccatataaagatttaaagcacaggagattggcatgtaatttctacttccagttgggcaacagaaatgacaagtgttttccccagtctgtactcacagagaaatgacataagaataggacagtcattttagtacttgccaaagaaccttaggtaagctagagagagggaggtcaatacaatagaagtggaaaagcacctaatttatgtataacttcattgctacaacgtgacaccaacacattaagagaattgatttttcagtattatggacttgttaccttacagtcaaacaatatgaggatgtggtcacgtgtattgtatttttatgtacactaaagcacttgaagcttttttttttttttttttttttttttgagacagggtcttgctttgtcacccaagctggagtgcagtagcacaatcagagctcactgcagtctttacctgccggactcaagcaatcctcccacctcagcctcccaagtagctgggactacaggcatgcgccaccacacctgactaattttttattttctgtagagacagagtttctgtagagagcccaggctggtctcgaattcctgggctcaagtaatccgcctgccttagtctcccaaagtgctgggattataggtgtgagccaccacgcctgtcccgaagctatttttgtacaagtaatacatgctcattttccatcagtacacaagtatataatgtaaaagatcacttccaaaatattgaaagaatgactaaaaatacgtcattctctaatctgcagttaaagaaatttctcctctctgttgatcattcttttaaaaatgctggctggtcacagtagctcacacccgaactgtaattccagtgctttgggaagtcaagacaagagtattgttgaggccaggagtttgagataaagagtgcctaaaattggcaacatttcaacaggagccatctcctaagagtttaagacacacaggattcctaaattaaaactatgactaggaaagaaaacattaagataacgacctttaacttagatctaccttggaggttctctttttgttttactacaatctatgtttggcaaacagactactcactgattgtgtgaattaaagtttaccctatgttatactcctgtctcgcccttctctactccaactgcaatgaagttatattcgtatctccttcaaattaatagtttacaaaggttaggagaagggtcttatggatagtaccaccagtggctgctttttcttcctaagctcctgaaaaaatcaagtagcatccttttagttctccttgatctctttacttcttcccatgtggcagctggactgtacatttaggccagtctctttcagcaaaatacaaactacaagcttgagaataagtacaccagttgaattctaatcagcaattaaaatgcatagaataatatggactccaactttgaacatataggatataccttacttcagtttctagataataataactttgtcaagtcacctaagtccagcttatcaccttaatatgctttcttagatatttgagaaataccagctccagctgtgtacctttggctttgatttcttcatcttgtggatgagagatttaaactcaatcaggctttttccagttgttgttgttgtttaagacacagcgtctctctctatcactcaggctggagtgcagtggtgtgatcataactcactgtaacctcaaaccctgggctcaagaaatactcctgcctgagcctccagagtagctggaactacaggtgcacaccaccacacctggctaattttttaattttttatagagatggggtgttgttttgttgcccaggctggtctcaaactcctggactcaagtgatcctcccgcctaggcctcccaaagtgctgggatgagacaccatgcatagtcaccccactacctattagtacagtgcttccattctgttttgcaccttttgctgaaatactggtctgctgtttttccaattgtcctccattttggaccccaggcctccttttgatcaataactattatcctgatactcaaaaaaaattctgagacagagatgggcctgcctacgtataggtatttaatagtaattgtggtataatttgaaaactcttttaagagttttacagtgggagtgaggatggggttaatcattagagtcttaaaaggacctaggaaatgtaccatgtgatttatgattctaggttaagataaaactttttcacatggtggtactaacccaacaattaacatctttaaaagtcccaatattttcttccaaatggatttgaaagctataaaatagcatttagttaaaattgttttggcaggccaggcagggtgcttcgtgcctgtaatccaagcactttgggcagccaaggcagtaggattgcttgggccaaggagtttgagaccagcttgggcaacatacggagactctgtctctacaaaaataaaaattaaattactagccatctcaaaaaatcttaaaaattagctaggcacagtggtgtacctctgtagtctcagctactcaggaacctgaggtgggaggatcacttgggcctgaaaagtagagctacagttacccatgactgcgtcactgcactcaagcctgggcaacagagtgagaccttgcctcaaaaaaagaaaaaagaaaaaaaaaggtgttttggcaaccctgtttagtcactggtgttctggccggagggaagcaaagagaatcaaatctgggtttcttagaaagaggaaggaaattcatgtaagaaagaggaagttggcaagcccctcatgcctatttaacatcttcccactaccctaacaattgagtataaatgttgcaaatagttcattttaatattcataaagcactttttgtgtgctaaatcctgaggaatacaaagatgatttttttttaagttgcttagctaggtacagtggctggctcagaaattaaactcctgtatgtaatcctagcactttgggaggctgaggcaagaggattgattgaggtcaggagttcaagaacagcctgggcaacattgcaagaccctgtctctacaaaaaaaaaaaatttaattagctgggtgtagtggtgtgtgccttcggtcccagctacttgggaggctaaactggggagagcacttgaatccaggaatttgaggctgcagtgagctatgatcatgccagtgcactccagcctgggtgacagagtgagactgtctttaaaaaataaaataataaaaagaaaaatctctagaaagtcctacaatacaggatgttatgggaacctagagtagggagaggtattagtccagattgaaggagtgggaagagggcaggaagcctagggaatgtgaatctcgaaagataaataagaaagcagacattcatttactcttaacaaatccactgtgcctactctgtggcaagcattgttctaggcgctgaagatacagaattgagcaaagtaaaagctcctgctctcatggaatttatattctagtaggaaaagagacaaaataagtataatagtacatcagttgttctacagaaaaaaaatgcagaggaaggaggcaagaagtgctgagatgaagattataatttaaaactagaatggggctgggcatggtggctcatacttgtaatgccaacactttgggaggccaaggcgggaggattgcttgagtccaggagtttgagaccagcctgggaaacatagcaagagcctgtctctacaaaaaaatttaaaaaaaaaaatttagctgggtgtggtggcatgtgcctgtagtcccagatgcttgggaggctgagatgggaggattgcctgagcccaggaagtggaggctccagtaggccatgatcacaccactgcactccagcctggatgacagagcaagaccctgtcaaaataaataaataaataagtaaaagtaaaatataaaaatacaaatagaatggtcagagagaagcaaaaagggtgatatttaagccaaaattggaaggagagaatgaagcagactttgtggatatccaagggaagattgtccaaggaatgaggcaagagcacatctgccagctctaagggccagcaaggaagcaagtgtgcctgcaacagtgagagaaggggatgggatcaaatcctctttacagactttggctcttgctcgtaaaatcagaagctgtcacaggttttggaatggagaagagatctgtcatcttttttttttgagatggagtcttgctctgttgttgaccctggagtgcagtagtgtgatctcggctcactgcaacctccacctcccaggttcaagcaattttcccatctcagcctcctgagtagctgggattataggcatgcgccaccatgcctggctaatttttgtatttttagtagaaacggggtttcaccacgttggccaggctggtcttgaactcctgacctcaggtgatccacctgcctcggcctccagaaattctgagattacaggcgtgagccaccaagcccagcctgtcatccatttaaaaaagatatctctgactgctgtgttgaaagtggactggagtgagaggagaagggacaaaagggcaaacacagggagaccaattagggggcgactgcattaatccaggcgtgagggttaggcggtgagaggttagatcccagatattattttgaaagaacagccaacaggattagattgggatggatgagagaatatttaaagatgactccaaacttagtgacctaagtagttcagaattgctactcactgagatgaggaatacaacaggagaaggagatttgtgggtcaagatcagaagcagagctttggacatattacatttgagatgtctattagacatccaagtggataggttaaatagagagttagatatttaactctgaagttagaaaaggtacaggctggagacataggttgaggagtcattagagattgatggtattgaaagctgtaagaccaagatgggtgcagtggctcatgcctgtaatcccagctatttgggatgctgagtcggggggatcacttgtggccaggggtttgagaccagcctaggcaacattggtagacctagtctctacaagaaataagagtttaaaaattagcttgatatggtgccacctgtgatcccagctctttgggatgctgaggcaggaggattgcttgagcccagcagttcgagaccagcctggccaacatagcaaaaccccatctctacaaaaagattttaaaaagctggcatggtggcatgtgcctatagtcccagctacttaggaggctgtggtgagaggatggcttgaaccggggaggtagaggttgcagtgagctgagatcatgccactgcactccaacctgggtgacagaaacagagccagaccctgtctaaaaaaaaaaaaagaccgggcgcaatggctcacacctgtaatcccagcactttggggggccaaggtgggcgtggtggtgggcgcctgtagtcccagctactcaggaggctgaggcaggagaatagcgtgaaccagggaggcggagcttgcagtgagccgagatcgcgccactgcactccagcctgggcgacagagtgagactccgtctcaattaaaaagagaaagaaagaaagaattataagcagttgacgaatgctttcaggtagatagatcttaggagctttattggtttttgtcaggtttctgttttactgtaatttgggggctatcaatgtgcaatacttgacaggaagttctgggcaccctcaaaatttgttctaaaagaatgtgtttggttaaagtatgataatcaagggttaaaagtagacctctgggggctgggtgcagtggctcacacctgtagttatcccagcactttgggaggctgaggcaggtggatcacttgaggtcaggagtttgagaccagcctggccaacatggtgaaaccccatctctataaaaaaaagaaaaaaaaaaaaagaaagaaagtagatctctgcctatgcatgaacttcagcctggttgtcactcagagattactggggcccaaacttttgtgcacatttgtagataatattaacaaacaaatcaattcatgcaaaaatctaagggagcagccagtagatacaaagttgttcccagaaaacccatggagaaagggttcaaatttcccccactgagacaaactctcccctaactcttatagtagctcacactgtgtgctagcctcatgggcaacctttctggaaaagggtgctaacttatcccagatcttctagtttttgtctgagtgaaatgaaaacaaaggtgggcaaagtgaaattctagttaataggtcactgtgtgcatgtattagctgcacccaattttgcattgtacaagcactaatataaggatctttcattctagtggttgtcccttcaaaagagaaagcctggtaggggaacagtattttctccatcctcaatattccatccctcatttatcttttttttttttttttttttttaatacagagtctcactctgttgcccaggctggagtgcagtggtgcaatcatggctcattgcagcctcgacctcccaggctcaagtgattctcccacctcagcctcctgagtagctgggaccacaggcacacaccaccacacctggctaatttgtttattttttgtagagacagggcttcaccacgttgcccagactggtcttgaacttggttcaagtgatcctacctctttggcctcccaaagtgctgggattacaggcataagccactgtgcctggtccttattgatcagttattcttctgaaacgctaaattagtaatcagaatcacgttccagcacagtatgcattactttgcttacatgagtatacctgtgctactgtgattctgggttgtcattgcttcataagaaattattccaaacactgagtagcataaaacaatgacaacatttattttgcttatgaaactgcaatgagcaaagctcaatggggagagctaatctgtacgccatttagtgtcagctgcagtggcctgaaagctagggactggaatcctctgaaggctttctcactcatgtctgccagttgatgcttgttgtcagctaaggccttagctggagttgtcataaaaacagcccactgtgcttcctctttcctgacaacattgtggttaggttccaaaggtgagcatcctgaaaagaggaggggagagaagggggctggtgtagtgggcgggtaagccgtatctctgttttttttttgagacggagtctcgctctgttgccaggctggagtgcagtgtcacgatctcggctcactgcaacctccacctcccgggtttaaatgattctcctgcctcagcctcctgagtagctgggtctacaggcgcgcgccaccacgcccagctaatttttgtatttttagtagagacagggacagggtttcaccatgttggccaggatggtcttgatctcttgacctcgtgatctgccggcctcggcctcccaaagtgctgggattacaggcatgagccactgcgcccagccaagctgtatcttatgacctagcctcagatgtaacgcagtgtcacttctgctgcattttagtcattgaagtagccacaaagttctgcccaggtttaaggggaggtgaaataatatccagaaatgttgtcatgccacagtctgccctcgggttacaattcagattcctcccatttgtaagatgcatacaccgtttcttctaaaacagccttgaggtctaggatctcatcatctagatcaggtccagggggactaacgctcctcaggtgtggttcctcaaatacaatgccttttgacttgaacacctgctcttagttagtatacaatgagtttatttaaggaaagggggtcgtgatgtattgaacttacttttaaatgcttcagggacaaactatatattttttcacacatatatatttgaagactatatacatacagaaacatgggccgggagcaatggctcccacctgtaatcccagcactttgggaggccaaggcgggagtattgattgagcccaggagttcaagaccagtctgggtaacatagtgagactctatgtctacaaaaaattaaaaaattagccaggcagtttggcacacgcctgtgggtcccagctacttgggcagctgaagtaagaggattgcttgagcttgggagtcaaggccgcagtgagccgcgatcacaccactgcactccagcctgggtgacagggcgagaccctgcctcaaaaaaaaaaaaaaaggaaaagaaaaaaagaaagaaaaagaaatatgcgcacacacacatatttctggggattacttcccatcccttgagcttgggcggaactgtatgactgcttaaatgatggaatgtagcagaagtgatactgttacatttgaggctaggttttagagagagaggtgggggagagggagagagaatgcaaataataaagcaaattgagcagatgttaataggtgaatctgaataaagggtatatgcaagtgttctttgtgctattcttgtgtttgcaacttttctgtaagcttgaaattatttccaaataaaaagtttttttttaatgtgatgcacatggaagaggtcctgagctttaaatattttgatatttttaattccagggcaaatcccaacttgatttttataccaaacctttagttcctcctttgcccagatttctacaagaagacaatctcgtttcctaaaagaactagttctaggagaaaccgtctttgagagaggagatttggcataatgagactcaacttttcaattatctttgtatgacctactacactaaaggcatcttgaagctatgtatggtttatagggaaattgtagaagagtgcacctcagcctccttggaacaaaagagactgggattagctgccttgaagaaccatcattgtgttcccagagttcaaattctaaaaatagtggctgctgagaaacaaccttctcatctttcctgtatgaaaaggacacttaaatagaaggctggtctttttacttaacagtgtcacaatctccaaacaaccaaggagtaatcactactaaatgtcccattttagaagctgtttgggtgggtgcgatgactccacgcctgtaatcccagcactttgggaggccgaggcaggcggatctcttgaggtgaggaattggagaccagtctggccaacttggtgaaaccctcgtctctactaaaaatacaaaaattagccggtatggtgctgcacagctactcgggaggctgaagcacaagaattgcctgaaccagggaggtagaggctgcagtgacccacgatcatgccactgcactccagcctaggcgacagagcaaaactgtttcaaaaataaaaagaacaaaaaatagaagctgttagttttttgtttttgtttttgtttttgagacagagtttcgctctgtcacccaggctggagtgcagtggctcaatctcggctcaccacagcttccacctcctgggttcaagcaactctcctgtctcagcctcccaagtagctgggattacaggcacacacctccaagccaacctaattttttttgtattgtagtagagatggggtttcaccgtgttgcccaggctggtctcgaactcctgagctcagacagtccacccgcctcaacctcccaaagtgctaggattacaggcatgagccactgtgcctggctgaagctgttagtatttttaaaatcatgcggttgaattgcttgagcccaagaattcgagaccagcatgggcaacatatcaaaaccccatcgctacaaaaatacaaaaattagccaggcctagtggcatgttgcctatagtcccagctgctcaagaggctaaggtgggaggatcacctgagcctggggaggtggaggctgcagtgaatcatgatcacaccactgcattcctgcctgggcaacagagtgagatcctgtctcaaaacataaaataaaattaaataaataaataaaaggcacctcagggccatttaataaattcatccgtaaccatcgtgcatagaattttattctttcaaaggttattatttggctgggtgcagaagctcactcctgtaatccagcactttgggaggccagtgtgggaggattgcttgagccccagagttgagaccagcctgggaaacatagttagacgccacctctccaaaatgtcttttttaaatttagctaggtgtactggtgcacacctgtattctcagctacttgggaggctgagttgggaggatcacttgagtccaggaggtcaaggctgcagagagccgtgatcataccactgtaccccagcctgggtgacagtgcaagaccttgtctcaaaaaaaaaaaaaaaaaaaaaagcttattattctgaaaaaaaaaatttttttttggagacagtcttgttcttgtcatccagggaccatctcagctcactgcaacctccgcctcctgggttcaagcgattctcctgcctcagcctcccaaatagctgggactacaggcccatgccaccatgcccagctaattgttgtatgtttagtagagaaagggttttgccatgttgctcaagctggtctcaaactcctggcctcaagtgatccaccctcctcagcctcctaaagtgctgggatcacaggcgtgtgccactgcacctggcccattattctgaaattctacattgaagttcttcttttgcttttttttctcttttttgagacagagacttgctctgtcacccaggctggagtgcaatggcatgacctcggctcactgtaatctccacctcccaggttcaagcgattctcctgcctcagcctcctgagtagctgtgattacaggcacgcgccaccacgcccagctaatttttgtatttttagtagagacagggtttcaccatgttgatcaagctggtcttaaactcctgacctcgtgatccacctgcctcagcctcccaaagtactgggattacagacatgagccactgcgcctggcctttctttctttctttctttcttttttcaaactccattttgtaaggttgatcagttgctcaaagactgacatgctaatcaaatttcagtgaaacagaggacttttgtttctgatcatgatggagttaaaagggaccagattaacccttctgccatacacacctaggaagctagacaaaacatacagaacaaccgttttcagatgttggacaattggcagtgcagaactgacgtcattgagataaagaaaacaaatgaggtaaattctgtgattttcctagctttttgcctaggggtgcaatctggatcataaaatcagaatgtggcaatctcactgaggacgcacagattggagttcatggaacctgaggcagctgtggaagttgctgtgcaaaattccaaaaaggaagaaggtatgcaaaaaccttcagaaatttgcataggatcttgagttttttctgaatattaaggtagccataagtagagctaagttccaggagactgagcaaagaacaattgaagagatgtaactgaacaattcccagagctaggaaacatacaaattatgaccaattggagtagaaataacttagtgacctcccaagatgttcaggagagactgcagcagaggtaaaccttactaaaaggtctaaactaggtctagagtaaagtacacgctagaactgcttaatgaagcttaaaaactagcctcaaaaacatcaaactaatccaaaagtaagttaacaatctggtacaacaaagacctatactctttaagggaagactacaaaatacagacattcaacaatgtgacatccacattagccaggtgtggtggtccatgcctgtaatcccagctactcaggaggctgaggcagaagaattgcttgaacccaggaggcggaggttacagtgagccgagattaagccactgtgctccagcctgggcgacagagcaagcctctgtctcaaaaaaaaaaaaaaaaaaaaaaaaagcagaaacaggccgggtgcagtggctcacgcatgtaattccagcactttgggaggccaaggcaggcggattgcctgaggtcaggagttcgagaccagcctggccaacatggtgaaacctcgtctctactaaaaatataaaaatcagctgggcgtgggggtgagcgcctatagtcccagctactgggaaggctaaggcaggataattgcttgaacctgggaggtggagattgcagtgagctgagatgtcgccactgcactccagcctggggtacagagcgagactccatctcaaaaagaaaaagaaagaaaaagaaaaacaatgtgacatcctgagatccaataaaaaattactatttataccaagaagcaggggggaaaaatcaggtgacagacatggacccagaaatgacagaaattatggaattagcagataagaatgatgaaacagctattataactatatttaaagaaaaacatgaatataatgaggaaagaagaaaaaagaaccagatggaacttctagtggtgaaaaatacagtatctgaacttgtaaccacatcgtatcaatctggctcaacttttttttttgagacagagtctcgctctgtcccccaggctggagtgcagtggcacgatcttggctcactgcaagctctgcctcccgggttcaatcgattttcctgcctccgcctcccaagtagctgggattataggtgcatgccaccatgcccagctaatttttgtatttttagtagagatggggtttcaccatgttggccaggctggtcttcaactcctgacctcaaatgatctgcccacctcaccctcccaaagtgctgggattacaggcatgagccaccatgcccggccaatctggctcaacttttatataacaaagttgtgagttttcagttgctatggattccccaggttgaaggttatgtaacctgagcatgcccagatgaagcaagcatgcaacgatagggggaatctaagtgctcagaccaaggagcagagacggaactaagtggacaccacatagtttgatccaggatccaatcagatcaaactctgacatcaccccatgccaggatccagtcagatcatgccttctggcatcacctcattgcaagatccaatcagataataccttgctaccctatgcttataaaacatgacccagaccccagcttggggagacacagctgagcatttcctcctatttccttgccagctgactcacagtaaaacttttctcagccgggcacagtggctcatgcctgtaatcccagcactttgggaggccgaggtgcacggatcacctgaggccaggacttcaagaccaccctgagcaacatggcgaaaccctgtctctactaaaaatacaaaaattagctgggcatggtggcacatgcctgtaatccccgctgctagaggggctgaggcaggaggatcacttgaacctaggaggcggaggttgcagtgagccgaaatcatgccacagcattccagcctatgcaacagagcgagactccgtctcaaaaacaaaaacaaaacttttctcaaaaactagtgccacagtattggcctctatgcacgtcgggcagtgagcccattgattgctcagtaacaaaatgaaaaattcaacatggcagctggcttaccccagagcaagcaatcagagggaaaaaaagagggttacctaatgcattagttttctattgcagtaaaaaattaccacaagcttagtggctctgaaaccacccttgcaaaaattacaagtgagataaatctgacatagaaaaagtatgatagtgaaaaaaagtctgacctaactgactccattttgcttctaacctcaaagccacccttgttcatttcccagcataggccaaactaactatgggaggaatttatagtttgaaagaggggtgtccaatcttttggcttccctgggtcacattggaagaggaagaattgtcttggaccacacataaaatacactaacactaatgatagctcataagcttaaaaaaatcacaaaaaaaccctcaatattttaagaaagtttatgaatttgtgttggaccacattcaaagctgtcctggatggtatgcagcccatgggtcaagggttggacaagcttggtttaaaacaaagatgaaaatagccccttcccaaaactaacaatctccttgttcagcgactaaaactgcctttgaaaaactaacaaactagctacaaagttaaaattatggttcagaagtcttgtagccagagggcacaagatttgtaatctccccagttgctcctatagataacatcactattgtaaaatctaagattgatgtttgaggtattttccagaccctgcattctgatgggctatctggtcttgtaacccccagcaacacataggaagaaactggctcatctggtcttgtaacctccacccagaaactgactcagtgcaggaagacagctttgaccccctatgatttcatccctgacccaaccaatcagcataccccattccctagtctcctgccctccaaactatcctttaaaaaccctagcctcggtgggcgcggtggctcatgcctgtaatcccagcactttgggaggctgaggcgggcagatcacaaggtcaggagattgagaccatcttggctaacacggtgaaaccctgtctctactaaaaatacaaaaaattagctgggcgtggtggcaggcacctgtagtcccagctactcaggaggctgaggcaggagaatggtgtgaacctgggaggcggagcttgcagtgagccgagattgcaccactgcacgccagcctgggccacagagtgaaacactgtctcaaaaaataaataaagaaagaaagaactagagaagcaagagcaaacaaaaacaaatgcagtctatactatataatgctatataaatcacaagagtcaaaagcacataacataggttagaaatagaaactgtcggctgggtgcggtggctcacgcctataatctcagcactttgggaggctgaggtggggggatcacaaggtcaagagattgagaccatcctagccaacatggtgaagccccgtttctactaaaaatacaaaaattagccaggcatggtggcacgtgcctgtagtcccagctacttaggagaccagcctggacaacataatgagaccttcacctctacaaaaaaaaaaaagtttttaaagttagccagccaggccaggcacggtggctcacacctgtaatctcagcactttgggaggccgaggcaggcggatcacctgaggttgggagttcaagaccagcctgaccaacatggagaaaccctgtctctgctaaaaatacaaaattagcagagcatggtgcatgcctgtaatcccagctatttgggggctgaggcaggagaatcgcttgaacccaggaggtggaggttgcggtgagccgagattgcccgattgcactccagcctgggcaataaaagcaaaactgtctcaaaaataaataaataaataaataaataaataaataaataattagccagccatggtggtgcatgcctgcagtcccagctactcaggaggctgaggtgggaggatcacttgagcccaggagtcaaggcttcagtttgagccgtgattgtaccattacactctagcctcggtgacaaagtgagagtctgtcactattttttaaatttaattttaatttgtatttatttatttgttttagagagagaggtctcactatgttcccctggctggtctcaaactaatgggctcaagtgatcctcccacctcagcctccagagtagctgagattacaggcatgcaccaccatgtacagctcctattctactttctgtctctatgaatttgcctattttagatatttcatataagtggaattatatatttgttcatttgtgtctcgcttatttcacttagtagagtttttaagattcatttatgttgtagtatatatgaggatttcattctttctgtggttgaataatattctattgcatgcatataccacatttttttatccattcatctattgatggacacttgggttgtttccactttttggctattgtgaacaatgctgctgtgaacattggtatataagtatctgtttgagtccctgcattcaatataatttaatatttaataatgcttctgtttagcaaacagctggcaaaattgcaaaaacttaataatcagctctgatgagcctgttagagccagctctagcacaatatcagagaatctgtaatttacctgactggacccaacaagcccaacttggaattcaagctcaccacaccggtattttccaaatttgcccgatgatgataattgcctaggatatttatgaaaatactgatccccaagccaggtgtggtggctcatgcctataatcccagcactttgggaggccaagacagagaagattgcttgagcccaggagtttgagaccagcctgggcaacatggtgaaatcccatctctacaaaaaatacaaaaattggccgggtatgtgatgtgaacctgtagtcccagctactagtggggaatgggggcggtggggcgggggagcaggtggctgaggcaggaagatcacctgagtctgagaggtcaaggcttcagtgagctatgattgcaccactgcactccagcttgggtgacagagtgataccctgtttcaaaaaaaaaaaaaaaaatagtgatttccagaccctcttgggacattctgattctgaagatctaaggcaaggtgatttttctgtctgaaaaactctaatattagtccccagtctcaccaaatctgggcctgaagggagggagtggggtacaaatacggtgccctggaagaaaggtggtgagagtgagtcctttggggagaaattgctgcaaaatttgagatgcatttttttcctctccaaaatcattcccagctccaacattcattgacattcattcagttctctcctgcttatctccctgaattctgtcttagcaaagaaaaccttccagaaagagccaagaggaaatcattaggccccagcaattttgacaagatcacagacgcttgcatatcattagactatttagaaacacgctctaaagttccgaggttgccattctgcagtgttattttgataccctgacaagatatttttagagcacatgaagcccaaattaaaacattgctacaggaaaaaaaaagtgaaatccaaccaggggtctattaaatggaaaactacagtaaatatcagataagagtgaagaaaatagtacaaaacatttttgaaaactattttgggagaagcaggagttggagagatgctcatgacttatgtgcagagatgtgttctgtatcctgccagtgggggagggaaagaccttatccctgtgttatagaactggggtccactcacctggcccagcaaaaagaatgctgatgtcaggatagcagtgaaagaaagtgaggactttgttgcagggtgccaaacaaggagagctggcagctcatacttaagacctgacctcccagatggcttacaggtaagggtttttaaaggcagggagacagatgtgctaggctaagtcataaaccagtacagggaggctatatattattttgacttaaaaaggaagggaggacaggtggattaaaaaaattttgatttctaattggttaagaggcaaagcttttgtctaaaactttgggatcagcagaaaagaatgttactggctgggcgcagtggctcatgcctgtaatcccagcactttgggaggccaaggtgagcagatcacgaggtcaggatattgagatcatcctggccaacaatagtgaaaccctgtctctactaaaaatacaaaaatcagctgggcatggcagcgtgtgcctgtaatcccagctacttgggaggctaaggcaggagaatcacttgaacccaggaggcggaggttgcagtgagctgagatcgcaccgctgcactccagcctggcgacagctagattctgtctcaaaaaaaaaaaaaagaaaaaaaaaaaaaaaaaaagaatgttacctgtggttcatgagtgtgaccttctccaggctcctcaggaagaaatttttaaaaaagaatggttggtttgggaacagtcctctgttcccccttatctgaggtccatgtgctagcagagtaggatgtgggtccgggtttctgaaaaacaactcagggacacatattaagatgttatcggctgggcgtggtggctcacgcctataatcccagcgctttgggaggccatggtgggcagatcacttgaggtcaggagttcgagaccagcctggccaacatggcaaaacctcatctctactaaaaatacaaaaattagctaggcatggtggcataagcctgtaatcccagctactcgggaggctgtggcaggagaattgcttgaacctgggaggcagaggttgcagtgagctgagatcatgccactgcactccagcttaggtgacagagcaagacaagatgttatctttagtttctatagggaataaaatatctcctgactctaacttccttggtgattgttttattgatttatttgtttattttttgagacagagtctcgctctgttgcccaggctggagtgcagtggcataatctcggctcactgcaacctctgcctcccaggttcaagctattctcatgtctcagcctcctgagtagcagagattacaggcgcccaccaccaggcccggctaatttttgtatttttagtagagacggggttttgccatgttggtcaggttggcctcgaactcctgacctcaggagatccacccgccttggcctccagaagagctgggattacaggcatgagccaccacgcccagccagttattgttttaaactactattgccttcttgttcatcaagttgctcatttacttctccaggctagctaggtgcctggaatttccctagaaggaacaccagatttttatttttcttttctttctttcttttttttttttttagatggagtcttgctctgttgcccaggctggagtgcagtggtgcaatctcagctagctgcaacctacggtctcccgggttcaagcaataattctacctcagcctcctgagtagctgggattacaggaagaaatttaaaacaaagaatgggtggttggagttcagtcctctgtttatagtcctctataaagaaaataaatttttcgttattttcatgcttggggagggtggtatccagcaggtccctaagaagggtccttgcttagtctcacttgcagcctgtcttggaaggtcctgatgccttgtattagcacaagaggagattcctatccactggggagggctggatgtaggctgctggcagggaagacacaggacttcactgtacatggtcaaatatcttactggccttctgtttactccctggttccttggcttgggcctggaatgtggttaattgggctttaaacccccttgccttcttcctctgcctttttgctctcaagagtagccctgtgtctggtgtttgtcacagtgtctccatttgaaggcttccatgggttaaagacccatctaacttccagaatcactgccgagaaggtccacaagcttaggttagacttgttagatccttagttcctaatatctttggggctagacctctttgatgagtctttgcatacaattcactggatagcacttcaaaggtttgttgactcccttaagcccattggtggattaagacagtgtctaggtaatgattcggatccaggtggccttggagtagggacaacttggcttagctgggaggtgctggcatgctcttcagacccagcactccagctatgacagggatttcaatggccttccttttcttggagtctttatacaattctaattggataatttggagcaagaacaaaaatcctcttttggtaattttaagatatgcttggtggtgttttttttgtttatttgtttgtttttttgagattgagtctcactctgttgcccaggctggagtgcagtggcatgatctcggctcactgcaacctctgcctcccaggttcaagcaattctcctgcctcagcctcctgagtagctatgactacaggcacgtgccaccacgcccagctaatttttgtatttttagtagagacagggtttcagcatgttggccagaatggtctcgatctcttgacctcatgatctgcccgcgtcggcctcccaaagtgctgggattacaggtgtgacccactgcgcctggcttactcttgggtttcttacaaagaaaagaggatagaggagagttctttagggtaatacaaggattctacatcactggtcaacccagaaagagagatgggcagatttcatatctatgagggaaagcgtaagcagtagatgctaagagttattttctatgtatgcttaattcaggacatacaacaagaatttcgtgagttccatcacatatactaggggatggaggtaaagcatgatgattatgaaacaggcgtatgccatcaaagagcatgccaacctgcataaagaggggggtgggcaaattaacaacccacaaccccctcacctgccagatgcctaaagtatatggcacatatttggattaaaaaaaatgtggtggagggatgactttgttgaatgacttgatttgccctatagagtcattttatgccgaccaatggaattttgaagaatgctcccaaaggcaatggatttttgttttgtcttagttaatgttgagccattattcctggctgctgttaggttcaattgtctcttcaggctactccccatggttgataataaaaccattatgagaatagggcagtcatccaaagcctagggcttgctgaaagctctggcagggaaaatggtagtttgggattagggaacaggaagggacagctaagctttgaggtactaacagttatttcctccttctgaattgaactggggatatatatacacacacatgcacacacacacatatattcatgtatttatatatgtatgtatatatccaattcctttttttttttttttgagacagagtctcaatctgtcacgcaggttggagtacagtggtgtgatctcggctcactgcaacctccccctcttgggttcaagccattctcctgcctcagcctcctaaatagctgggattacaggtatgcaccaccacacccagttaatttttatatttttagtagagactggttttaaccgtgttggccaggctggtctcgaactcctgacctcaggtgatccacccacctcagcctcccaaagtgctgggattacaggtgtgaaccactgtgcccagcaaatttctttctttctttctttttattttaactgtattttcttccagtcttgatccatatttgtgtccacttatgaagtgtagcatacatacccttttatgttctgtatttttggtggggagtctctctatgttgcccatgctggtctctaactcctaggctcaaaagatcctcttgccttggcctcccaaagtgctgagaatacaagcataagccacatgcccagctgatttttaatttttttttttttttttgtgacagagtctcgctcttgtcgcccaggctggagtgcagtgccatgatctcggctcactacaacatctgcctcccaggttcaagcgtttctcctgcctcagcctcctgagtagctgggattacaggtgcctgccaccacacccagctaatttttgtatttttagtaaagacaggatttcgccatgttggccaggctggtctcgaactcctgacctcaagtgatccgcctgcctcagcctcccaaagtgtgctgggattacaggcttgagccattgtgcccagcctgatttttaaaatttttatgtatttatttatttttatttttatttttattttgagacagagtcttgctgtgtcgcccaggctggagggcagtggcacaatcgaagctcactgcaacctctgcctcctgggttcaagcgattctcctgcctcagcctcctgagtagctggggctacaggcgtccaccaccacgtccggctaatctttttttttttttttttgagacggagtttcactcttgttacccaggctggagtgcaatggcacgatctcggctcaccacaacctctgcctcccaggttcaagcgattctcctgcctcagcctccctagtagctgggattataggcatgtgctaccacgcccagctaattttgtatttttagtagagacggggtttctccatgtcagtcaggctggtctcaaactcccgacctcaggtgatctgcctgcctcagcctcccaaagtgctgggattacaggcgtgagacccctcgcctggctaatttttgtatttttagtagagacagcatttcaccatcttggccaggctagtctcaaactcctgacctcaggcaatccacccgctttggcctcccaaagtgctgggattacaggtgtgagccaccgtgcctggcctctgttttttttttttttttttttactattaacttttccttttttgtattctactgcatcttctcagaattgtgttctgtcaccaaaagcagtttcaacaaaagcaaaaagtgactaatgggatctaattaaactaaagagcttctgcacagcaaaataaattatcaatagagtaaacagacaacctacaaaatgggagaaaaattttgcaaactatgcatcctacaaaggtctaatatccagcatctgaaaggaacttaaatacatttacaagaataaaaacaaacaaccccattaaaaagccatcaaaggacatgaacagacacttttcaaaagaaaatatacatgcaaccaataagcatatgaaaaaaagctcaacatcactggtcattaaagaaatgcaaatcaaaaccacagtgagataccacctcacaccagtcagaatgatgatgattaaaaagtcaaaaaataacaaatgctggcaaggttgcagagaaaaagaaacacttctacactgttggtaggagtgtaaattagttcaaccatagcggaaagtagtgtggtgaatcctcaaagagctaaaaacagaactaccattcaacccagcaatcctgttactggatatatacccaaaggaatataaatcattctaccataaagacacatgcactcgtatatttattacagcactattcacaatagcaaagacatggaatcaacctaaatgcccatcaatggtagactgaataaagaaaatgtggtaatatccatcatggaatactatacagccataaaaaagaacgagatcatgtcccttgcaggaacattgatggagctgaaggccattatccttagaaaactaacataggaacagaaaaccaaataccgcatgttctcacttataagtaggagctaaatgatgagaacacatgaacacgtagaggggaacaacacacactggggcctaccagagagtggagggtgggagaagtgagaggatcaggaaaaataactaatgggtactaggcttaatacctgggtaacaaaataatctgtgcaacaggctgggcacggtggctcatgcctgtaatcccagcactttgggaggctgaggtggatcacgaggtcaggagatggaggccatcctggctaacacagtgaaaccccgtctctactagaaatacaaaaaaattagccgggcgtggtggcaggggcctgtagtcccagctactcgggaggctgaggcaagagaatggcgtgaacccgggaggcggagcttgcagtgagcagagatggcgccactgcattccagcctgggtgacacagcgagacaccatctcaaaaaaaaaaaaaaaattctgtgcaacaaacccccatgacacaggtttatctatataacaaacctgcaactcaaggttaaaaaaaattattattattattattattattattattattattattattattttattattattatttgagtcggagtcttgctctgttgctctagctggagtgcaggggcatggtcttggctcactgcaacctctgcctcccgagttcaagcgattctcctgcctcagcctcctgagtagctgggattacaggcatgcaccaccgcgcctggctaatttttgtatttttagtatttttatttttattttatttattttgtttattttattttattttattttatttgttttgttttattttatttattttgttttactttattttattttgtatttttagtagagactaaaaatagtagagagttttagtagagggttttgccatgttggccaggctggtctcaaactcctgatctcaggtgacccacccacctcggcctctcaaactgctgcgattataggtgtgagccaccgcacccggcagaattatgttgttttaaaacttagcattatataatgtttttaatgatgttatttaatccttatgagtagatttttaaaaaagactctttcctggccggacgcggtggctcacgcctgtaatcctagcactttgggaggctgaggcaagcagatcacctgaagtcgggagttagacaccagcgtgaccaacatggagaaaccccgtctttactaaaaatacaaaattagccagacgcggtggcacaagcctgtaatcccagctactcgggaggctgaggcaggagaatggcttgaacccgagaggcggaagttgcagtgagccgagatcacgccattgctccagcctgggcaataagagcaaaactccgtctcaaaaacaaacaacaaacaaacaaacaaaaaaacctctttcctgactgtaaaagtaaagcataattgttattgttaaaaatacagataatatgtgaagaaagtgaaaaattacctttgatattttgaagtgtatccttcaagacttttttctatgcatatataaatatatatgtacaaaaatggaatcataccttttagttcctgttttccatgtcaatagatatatagtgacatatttcatgtttttatgaatataccatgatttatgtattctattagtgacactgcaattgtttccaaattgtcactattgtaacagtcctcatcatcttctctccttaggactaattcctcctataagtagaattggtgagtcacagagcatgcacatttaaacactttaaaatacattgtttaccaatctcactgccagtaggaacgtatgtaaaggttcctttccccttgctcttgccaatataattatccttcttaatactcgcaaaataatctggaattaatgatcagaaaacagaccttccatcttggaggcggataagtggaaggtttattcctccccttacaacaacaacaacgacaacaataacaacaagacgtttgctgaacatgctggcatagaggacaagttaaaaagtttctggactcaaagggtgctcctccaaagctccgggcctccgggctacccctacttgaagccgctatgcccctctcctgtgcccgaggtggccgctgggtggcaggggaggcccgggccgacggcggtcccaccgcactgtcgcgaaggcaggcgaagaacagggccacactgagtggggacaactgggcccgggcccagaggacacgaaggaaggtccgggagaaggaattcctagtttcagggaagaaaaggtggctcgagtgaggaaactgcgggggcaacggtctctcgtcgccgggaccccgccgtgtgccgcccagggacgcgagggggcgctgctgccgcgccaggggcgagggtcccggggcctcctgagcacctcccggccctgcccggccaactcagactacacccggactctgcccaccgcgtttccgccctcggcctcgggtccctggagggctcgcgggtaggaagagtcggggtggcgggactttcgccgacacccggctccccgcctggtggctgcgcacacgaggccggcgacgggacttgcccgcgtctcagcgcctcctgtgtgaagcgggaccgctgcggtacctgccccagggaaggccgcggggagggttacagagcccgtaggcactggcggggatctttatacacccccaaaacacacacatcccacccagtacccagcacccagcacccagcacggagggcttattattaacaacttcctggaggccgcaggggcagtgctggctcactgtgtcccttctccctttcagctctccctagacctctgtcccaaatcagaaaagaattttacaaactgtgctttcctctcggggagcccccaccacggcgtaacccagcaggcaggaatggcacacgtgcaggaaaatgagttcaacagccttaccaggtggtgtcaggatcagcatctgacagtattcttgggagaaggggcgccagcctctcctggcctgctgtgcgctctgccaaagtcttcgctcgaccccgcacatcttgctccgttccctagtccagatcccagctggaggggccagctgcagccacccctaagaatgaggaaatgggagcggggtggggggctgggttctgtgttggcggttgccgtggctttgctccgagttctggagccaaaccgcccactccctgagacggctaggtcacagaagcagtgggtcagaagccagaggggacgtggggagtgccaccctggagcctaccggcacacctgctgagatggaggcctcagatgggcaagggggtgaaggggacaagccactagagcaggtgaagtggggtgtgagggagggagggaaggagggtcccggaggggctggttttggaaagtagagaacatgaaattcaggaaagaagagaagaacaatgatagggtacctgagatagcaagaggcctaaagcacaagaactttcattcattcagaagtttatgcatgacctgtgttcctggcgagatgatggggaagaggtcgcctctcattgttggttatgaagacttgagagtatgtgtatgtatacacatggtctgtgtgtggttgtgtggtgtgtgtgctgtgttggaggagttgatcagccagagtcctgtctctaggacctggaggagcctgtgtcccatctcctctccatgcacctccctccccctggcctttcccttcagagtggtctggacgggatcttccttgttctccccgaacacagactagaattcatacttttctgagaagcttttgaaaggtgaggggcaaatccagttctgacttctagtgttatttcacagtcactttgttgccacttattttcagctttctttttttctttgttctttttttttttttgagacagagtctcactctgtcacctaggctggactgcagtggcatgatcttggcccactgcaacctctgccccctgggttggagcaatttatcctgcctcagcctcctgagtagatgggattacaggtatgcattaccacacctggctaatttttgtatttttggtagagagggggtttcgccatgttggccaggctggtcttgaactcctgacttcaggtgatccacccatctcggcctcccaaaatgctgggattacaggtgtgagccactgtgcccagttttgctctgtcacccaggctggagtgcagtggctcagtctcggctcactgcaacctccacctcctgggttccagcaattctcctgccccagcctcccaagtagatgggattacaggcacgtgccaccacacttagctgatttttttgtatttttggtagaaattgggttttgccatgctggccaggctggtcttgaacttctgggctcaagcaatccacccacttcagcctcctaaaatgttgggattacaggcgtgagccactgggcctggcctaattttcagctttctttgccccacttttgtggtcaaaggttctttctcatcatcaccatcatccactttttctgaatagtcattagatgcatggtttattagtccattttgcattcctataaaggaatacttgaggctaggcaatttataaagaaaagaggtttatttggctcacagtcctgcaggctgtacacgaagcatctgcttctggtgagggcctcaggaagcttacaagcatgacagaagatgaagagggagcaagcttgtcacatggtgagagagcaagcaagagagagaggagggcgtgtcaggctcttgttaccaaccagctctcacatgaactgacagagtgagaactcacttaattggggcagggagggcaccaagcccattcatgaaggatccacccccatgacccaaacacctcccatcagaccctgcctccaacattggggatcacgtttcaacatgagatttagaggggacacacattcaaaccatatcacatgacgatgctagaggctagggatgcaaagaaatgggcccagtctgatgcagtcagtaaacatttgccaagtgagtgagtaaatgaatccctgttcattcccccaaggagctgcttaaatcttttgatgcctcattgttctcatctgtaactagggttaatgatattgaaaccgtccctagaaactttataaaattaatcagaaaaaaagaggggaaaaatgaaaattaactgagcttgcagctcattcagcatgaatcatgaggtcagcctgctctctgacccacttccttggagttctttggtgcctgtttccttagaattccgtagaccctgggtgcggtggctcatgcctgtaatcccagcattttgggagccgaggtgggtggatcacttgaggtcaggagtttgagaccagactggccaacatggtctctactaaaaatacaaaattagccaggcgttgtggtgcacgcctgtaatcccagctactcgggaggctgaggcaggagaatcgcttgaacccgggaggccaaggttgcagtgagccgagatcacaccactgcactccagcctgggtgatagagtgaataaaaaaaaaaaggaattccatagaccctgttacaaggatactcccttaactgctctgcagataacagctcgaacattatgaagcattgcgttttctctttaaatattatttcagatcctacataccactcaaactacagatggcagttggtctaaagaacccttcaaaaacctgattcaccaaagaatgcagtttccacatcctcataatttcatcccccgactctgaccaatcaatggccccagttttttcaatccctcccactccatgatctccttaaaaaccccagtccagaactccttgggaagatagatttgaggatctccttccatctcctcactgagcacccagcaatcaataaactctttctcacagtgacatgatctcggctcactgcaaccttcaactcctggacactagcaatcctcccaccttggcttcctgggtagctgggaccacaggtgcacgccaccatgcccagctaatttttgtaattttttgtagagaccaggtctcactatattgcccagactggtctgctgccacttttgctgtctctatatattggactgtgagtgtccagcaggcatataaacctgttggtcctataacaacatctaacctgacagaatttgcgggaagataaaatgagctaatgtttaccaagtgctttgcagttacctagtagaatatgctgtgattattataaaagaaagaggtggaatattctaggttttctaagcagagattttcagagatgggtttctttgcccaaggctcactcacatccatgctgggtcaagaaggtctgagggcaatggagaagggctttggctgccatttgggtcagtccctgccagcactgcccccaggagtaacggtccaatcccccggcttagtgccccctgcctcctcctaggtgacaaatgtgtcatgcctggagacaagctccagcgccagccctgctagagactcgctcatgcgccatgccaagggcctggatcaggacaccttcaaaactgtgagtaaagagccagcctggaaccctgtccccttttccccattggtcaggaggcctgagtcaggaaatggcaggcctcagacccacagcgcattgccccacttgtcttactcttggtaaggacttttggtgagaggtgcaccagagccacctcccgaaacacgcagcactgggccactcagggctgcggccagaccggtgtgctggatacctgggactgcccatctgcctcttcttttctcccatggcccctcacctcacctgttgcctcctcagtgtaaagaatacctaagaccgctgaagaagttcctgcgaaagttgcacctgcccagggaccttccccagaagaagaagctgaagtacatgaagcagagccttgtggtcctaggggaccacatcaacacctttctgcagcattactgccaagcctgggaaatcaaacactggagaaagtagggcagtctctttgctctgctccccatacctactcctgggcaaccccctcttcattcaaggggacaccttagtcaatcccccagtccttcatctttatgtggaggagtcaagagcctgaggggatggagagagctcctagtcactcaggacagccctgactgcaccttgtctctgactgaacaactgcgtgcaggcgctcaataccaggataggatattcaagtttgggcaaatccccacccctccattcccccaaccccaaaccccaaaggggcatgtggcccatattcccctgggtgggtcctgaccctgagacaaatgctggagggaggaagcgctgtgctccacctccccagcctagggtctccccctttgcaggatgctctggcggttcatctccctcttctcggagctggaagcaaagcagcttcgccgactttacaagtacaccaagagcagccagccggccaagttcctggtgaggcgcaagacattccgcccgagcacagctgagggttggttgatgtgtccttagacttgcggggaggcctgggattgacacacccagagcccctctggtccttcccagggctcactgccagggcaagactctgctgcttgacctttacccctgccctgggcagagtgggctgaagaggccgaggctcagcatcaagttctccatatatatttgatgcacgggcaagcccgggaaagttcttggttttgcccagaaaagaatttaagggtgagctggtggtattacacagcaagtttatggaagcggccgtgtagagtagcagcagaggcactcctccttgtggagcagggctaccctatgggcagtgtgcccagagtagcagcacaggggcagctctgagctcatatttatccccgcttttaattacttgcaaattatggggtggttatttggaatttaccagaaaaagggtggtacttctgggttgttgccatgggaaggggtcgcaacttccaagtattgctatggcaatggtaaactgacatagcattggtaggtgtgtcttagggagaggtgctttcaccccttccctgtttcagctagtcttttttttttgatatggagtctcactctgtcatccaagctggagtgtcgtggcgcgatcttggctcactgcaacctccgcctcctgggttcaagtgattctcctgccacagcctcccaggtagctgggattacaggtgcacaccactgtgcctaatttttgtatttttagtagaaacgaggtttcactatgttggccaggctggtctcgaactcctgacctcaggtgatctgcccgcctcagctcccaaagcattgggattacaggagtgagccatcgcgcccagcctaccactcttcatgttgtatgggctataggttttgccaaaggtatgatgacatgtatctaccattacagtatgatatggaagagtgccatggtcctaaaaaccccctgtgctccatctatttgtccctgccttcctgcccccactcccctggcgaccactgatcttaggttcactgtctcttagttttgctgtctcggaatgtcatatcgtcgggatcatacaatatgtagccttttcagattcgtatcagtgaaattttcatactaggtttcattagaatccattggtttcaggggctccatgaggtcaaaatattacagggactcctgggggtttgcagagcacactttgagaaccactggtctggaataataatcatagataaagcagatgtaaaagcattctatgtgccaggtactttatattccttcaagtaatattcaaaagtaaccctaagtggtaattaggtttattgtctgcagtgtgtaaatgaagatcccaaatacagggaagtaaggtaatttgtcgcagtctttatagcaagtaggaaggaagaggaagggttcagcctccatctggctgggatgagagccgtgctctaactgcgccctcctgcactctcgccgtgcagccctaaccaagtcctctccctctctgcatctgtttcttcctctgaacatgtaacgattggagaacttcaatgatttctcttctgaataagaggagctgccactttactgatttctagatttctggatttcattggcctgaattttttttttttttttttcgagacagagttttgctcttgtcccccaggctggagtgcaatggtgagatcttggctcaccacaacctccacctccaggttcaagcgattctcttgcctcagcctcctgagtagctgggattacaggcatgcaccaccatgcccagctaacttttgtatttttaatagagacggggtttcaccttgttggccaggctggtcttgaactcctgacctcaagtgatctgccctcctcgaccttccaaagtgctaggactacaggcatgagccaccgcaccaggccgaaaaatttatatatatatagtctttgaattttaatttcaaaattcaagctctcaatttatttcatttctaaaatttttattttttttttaacagactcaaagcttacaaaggctcccatttttttttttttttaagacagagtttcgctctgttgcccaggctggagtgcagtggcgtgatctcggctcactgcaacctccgccttcagggttctagggattctcctgcctcagctaaacgagtaaggctcccaatttaatttttgctaagttagatctttaaaacacatatcatttcattgcaaaaaaacaataagacactgcagttccaaaaagagatggaagacatgatctcaaaataaaggacaacgcaggaggacaccattggcagcttgcctccatgtccccacagtcttttctctcccacatctgtgattcctaccccatccttttggttaggcaagtgtgaccggcaggcagaccttagcatttctcaacaaatgcggtgctgggactctaaagttcaggtccccctcttctcaacactctccttaacacggaggctccatggcaggtgacattctgcgcctcggatgcgccggagaggtccttgctggccgaccgggaagacagtctgcccaagctctgccatgcatgggggctgcacagcaacatcagcggcatgaaggagcggctgtccaacatgcagaccccaggtcaagggagccccctgcctgggcagccaagatcccaggaccatgtcaagaaaggtaatgaccatttggtgttggggtgatgcctggacccaggagtttgtgagtggtgtctgggtgtttcccaagagtagactcaagcagccgggagcctctgcccccagcctgacaagctcctcttccctcctttccatcttctcttcatcccgcattttcctttctgttttttcttctctttctccactttctcttctctttttagtccccctcttccccaggcttgctcattatagaaaggtttttgtttttattatttatttattttattttatttattttttccagacggagtctcgctctgtcacccaggctggaatgcaatggcgctatctcggctcactgcaacctctgcctcctgggttcaagcgattctcctgcctcagcatccccagtagctgggattagagatgcccatcaccatgcctggctaatttttgtacttttagtaaagacagggtttcacggtgttgcccaagctggtcttgagctcctgagctcacacaatccagccgcctcagcctcccaaagtgctgggattacaggtgtgagccacgcacctggcttttttttttttttttttttttttttacattcctgacctgttgaaaagatgaggctattattcagcagaatgttctccttcctgatttattccctattgcttccttttgacatcttttagcttgttcctctataaacaggactcgaaagtcttcatgggttcaaatgaaacatgtttttggctagaggctacataagagatgaggttatgctcttcccattattacctgacaaagcacagaatatctcatggacccaccgggaatgggctaagattagtcactgagtctgtccttgcaatgaaaataacctatgtggtatttctttggcactatgttaataaagtaagttattttattttttatttttatttttttgagacggagtctcactctgcggcccaagctgaagtgcagttgtgcgatctcagctcactgcaacctcagcctccccggttcaagtgattctcctgcctcggcctcctgagtagttcagattacaggcatgtgccaccacacctggctattttttgtatttttagtagagatggggtttcaccatgttggccaggctggtctcaaactcctgacctcaactgattcatccgcctcagcttcccgaagtgctgggattacaggcgtgagccactgtgcctggccataaagtcagttcttaattaaaacttggcaatggggtttgcaaacagtactgggaattgggtcatgaggcctaggagaggagtaaggaagaatcagaggttggagccagaggtcgaggaaactcgggtcttgccctgactcttcccctaacttgctgtaagactttgggcaggtcattgctttaccctggacctgggtgacagtcctcatctgtaaattggggacaatgccatctctctactgggtttctgtgagaaaaaactaagtgatataggtgggaagtaagataggattttgctattcttcctctctgcccctacaacaccccccatgtattacagactgagattcttactatttgtgatgtcattgggactgtctctgaccttctctttttcagattctttaagggagctttctcaaaaaccaaaactcaagaggaagaggataaaggaagccccagaaactccagagactgaaccgtaagaagaccaactgggacaaagggcccgcttgtcctggctctcagagcacggggaatggagaccaaaaagggaaaagaattgtccttatcaaaaagattctcaggtcttaattaggaataaatgaggtgggaaataaacattcttatgacagttctaccttacttgaccaacagtcatcattcgtacattttaaatttgtttaaaagatatttgccagccaccttctaagtggcaggtgccccacatatgcacagatgaataagatgtggtcactttgtcaaggaccatcacagtctagtggagcagacagacatagaaaagacacgacagcagggtaaatacaggtgactggggcaggcctccggggagttaacaaaggagctgggtgtttgccagtggagcacacaggtggggagggagggagcctggggtcagagaatggcaagcctggcagcccgcctgcattgtctggacttcattttgtgggtagcttgggatgggcagtggtaagggaagtgtcaagtagtggaatgaatgggtgtcactacggtattggggagatgctctggtgactgtgagcaaagtgcatggaagtgagcgaggctagaggcaggagaccaaagaggaaacaacaccgatggtcttagctaacatggtggctcgagccatcagtcacaaatccacagcctgcacactaaagtaaggctactgatgtgttttgtttgtcctgggtcatgttctacttgttgtttaaaacactttaagtccgggcatggtgcctcatgcctgtaatcccagcactctgggaggctgaggtggaggtttgtttgagctcaggagttccagactagccagggcgatatgggaaaaccccatctctacaaaaaaattagctgttcatagtgacgcacacctgtagtcccagctatttgggaggctaaggtgggagaatcgcttgagcccatgtgtcagtcttttctcgcactgctaataaagacatacctgagactgggtaatttataaaggaaagaggtttaattgactcagttccacgtggctggggaggcctcacagtcatggcagaaggcaaatgaggagcaaagtcacatcttacatggcagcaggcaagagagtgtgtacaggagaactcccctttataaaaccatgagatctcatgagacttatgagaacagcatggaaaaaaacccaccctcatgattcagttacctcccacttggtccctcccacaacatgtgggtattattacaattagaggtgagatttgggtggggacacagagccaaaccataccataccgccccggcccttcccaaatctcatatcctcacattttaaaaccaatcatgcgttcacaacagttccccaaagttttaattcatttcagcattaacccaaaagttcaagtccaacatctcatctgagacaaggcaagtcccttccgcctatgaacctgtaaaatcaaaagccaagttagtaacttcctagacacaatggggttgcaggcattgggtaaatacacccattccaaacgggagaaattgggcaaaatgaagagactacaggtcccatacaagtccaaaatccaacagggcagtcaaatattaaagttccaaaatgatctcttttgactccatgtctcacactgaggtcatgctgatgcaacagataggttcccatggtcttgggcagctccagccctgtggctttgcaggatacagccccactcctggctgctttcacaggcattgagtgtctgcagcttttccaggcacatggtgagctgttggtggatctaccattctggggtctggagggcagtgggcctcatctgacagctccaccaggcagtgccccagtgggaactctgtgtggagtctcctaccttacattttccttccatactgccctaggaaaggttctccatgagggctccacccctacagcatacctctgcctggacattcaagcatttccattcatcctctgaaatctaagtggaggttcccaaacctcaattcttgacttctgtgcatccacaggctcaacaccatgtggaagctgccaaagtttgtggcttgcaccttctgaatctatggcccaagctgtacccttctagccatgctggagcagctgggatgcagggcaccaaatcctgagcctgcacacagcaggtgagccctggacctggcccaggaaaacattttttcccttctagacctctgggcctgtgatgggaggggcttccaagaaggtctctgacatgccctggagacattttccccattgtcttggggattagcatttggctcctccttacttatgccaatttctgctgccagcttgaatttctccccagaaaatgagtttttctttttctttttctttttttttcactagttgtcaaatgatcctttattgaaatattttcctttgtgcttaactagctgggcattccacagcaccactgttgatgtcatctatgatgtcatgagggtggcggccatcaacattacaacccacagagactgggcagtccccaggatctctttaatggttccagagagttctctggctaaggatcggtgctccatctgtcgagcaaggttgacgatctcatcaaaagtgatattcccactgtgtttaatgtttttctgtttctttctgtctctggtggttccttgagggctttgatgatcagggcagaggcagaaggcaccacctcaatctgggcctgtctgttctgaatggtcagtttcactgtaatcctcaggcccttccagtcacccgttgccttggcaatgtcaccaccaacgttttttggagacagacccagggggccgatcttgggggccagggcagaagtggcatctccggtgcacctcaggtatatgactttgatctcgttggggtcgaactttggcggcatggtggaggcggctggtgtcagatgaacccggattcgggacaaccgaagaaagttgcaccttggcctcctccaagccgaaagccaagagcgagtttttctttttctattgcattgtcaggctgcaaattttgtgaactttttttttccaagccaaactgtatccagctttattaaagatactttccataaacagtcatggtatttcaggcaggacatgggcagacaatcattaacagtatacaacaactttcaaactccctggattcttcagtggactaccaaaaagaaagccagtataaaacccaatgaagtcttcatctgatgctctgaacagggaaagtttagagtgagggttgatatttcacattcagcatgctgttaacttttcacaaaccaaccttgactttcaggaagtgaaatgaaaatggcagaatttatctgaagattcacaatctagaaatggaaccactgctcttttgacaggtgccatctcagtggcatctggaaagtccagattgcctgacactggtaaccaatgactaggggtcaggtcccaacagacgtctgggcttaagggagttaagtctatgctgaaagatggaaagggagaagaggacataaaaataaatttgtttttccataccgcaagccttttgtgccaaggtggccatgtgtatcaaagccagggaatccctcctcctgggagccaaaaggaagtctctaaaaactagaagggaaaggtgttttccccatatcaatccagcttcggagtcattctattagtgacgtatgccccttcccctaaaaacaacaatgaagtgttctgtgtgctaacaacgtagcttaaaaaaaaaaagtaaaataaaattctgcatttttataaatcttgataaaaaatagtatttcaaactgtatagtcaccagatgtacacagttatcaaaaatgcacacacttcacttggcatctccagcaccttcagctttctgtgcctgatctgttttggcatcttcattttctgcagggctattccctccttgccagcatcagcttttccctttttccctttgggtaccttctctcccttctttgcaggggccattttaggcttgggctccggctttggaaaagcaggtttagcagacaacctcgcggatcttttctgtggttcgtccttcgtcttggctttatctcctttagcatccccttcagcctttctcttggtcatggtggcggcgacgatggcattgagacgtaggcactgggcgcaggatgcagcggcgcgcgggctttgctcggttcggggatcgttctcgcctcttcttcctccaaattttgtgaacttttatcatttccaggagggtaagtaggtccaaacattccccaaaaacacaaatgacatattttccagggctctgcctgaggcagcagcatatagggtgcagggctgccctggagcaggagaggccagggcagatgtgtgtgactcttctccctccctccctcgatttgtgttcagaagtaagtatcgtcatagactgacaaggctaaaatgaatatcaatctagtctcgaagaaggagttcagggaagcatgaatgggggaagcggggaggaagcgccatttctttcctccttagagtcatcgcctcctggaagtggcaagatgagacggccaaggcataggcctggggccagcctggcttggctagaccctgacagttttgtcaaagcagggaggatttcagagagaagggaagccgggctggagggtgtccatgatgactatgggctttccaatgttttctactcctaagagatttcagaaatgtggctgttttgggaacagtccaaaaacacgaagtatccccagtagtcaaggcagcactgccacctagaggaattgtgagacactacagccttgttctttcaaccaacatgtgcaaaccagcgtgtgcaaaagatgaagatgagagaagggagccaggggttcgtttatcaaccttgagaacaatcgggacgcataaaggcaaaaatggacaacaagtgaggcttggttttgaagctttctttctttcttttttccttagacggaatctcgctctgtcgcccaggctggagtgcaatggcgcagtctcggctcactgcaacctccgcctcccgggttcaagcgattctcctgcctcagcctcccaggtagctgggcttacaggagcgcgccaccaagcctggctaatttttttgtattttcagtagagacggggtttcaccatgttgtccaggctggtctcaaactccgctggcctccgcctaccaaagtgctgagattacaggcgtgagccaccacacccggtcaattattgtatttcttgtttattaactgtcttcttcccttagaatgtaagttccacagggttagagatttttgtctgtcctgttcattgctgtatccaaagcaattacaatagtattcaacatataataggtacttagcaaacttttaatgaatgaaccaacccaaaacagagaattctgaccaaccacctcctcgttcagaggggaaaacagaggcccaagaagaaaggcgacttctccaaggttgtgcaggaagtcaatggcagaactggaacgacaactcagacctgaggtcccccaggccagcgcacttcctacataccaacgacatatgtttcacctactcttggcccacacactcatttctcacaagatagaaataaccctcaagactaaaatgtattacttcttctccttcttcttcttcttttttttttttaagacagtctcactctgtcacccaggttggagtgtagtggtgcaatctccactcaccacaacctctgcctcccgggttcaagcgattctcctgccctatctccagagttgctgggattacaggcgcccgccaccacgcccagctaatttttgtatttttagtagagatggggtttcaccatgttgtccaggctggtctcgaactcttgacctcaggtgatccgcccacctcagcctcccaaagtgctgggattacaggcattagccactgcgcctaaccaaaatgtattacttcttctagaatttttattttttaaaagtatctctacccaaaagtataatggtggacttgggaacaccagaaacaggttgttggagaggctattgggaagtggggagccttggtggaaatccccaaatcataccttggcctatgctgccttaggggtgaggctcatcctagagaaagtgcctcactatcggagccttcgagaagggtccttttccttagagaataaagggtactttccctaaagttttactttcagttttttttgttttttttttttgagacggagtctctgtcacccaggctggagtgcagtggcgcaatcttggctcactgcaagctccgcctcccgggttcacgccattctcctgcctcagcctccagagtagctgggactacaggcgcccaatggtgcccggctaatttttgtatttttagtagagacggggtttcaccgtgttagccaggatggtctcaatctcatgacctcgtgatccacccgcctcggcctcccaaagtgctgggattacaggcttgagccaccgtgcccagctgtttcctgactttttaatgatcgccattctaactggtgtgagatggtatctcattgtggttttgatttgcatttctctgatggccagtgatgatgagcattttttcatgtgttttttggctgcataaatgtcttcttttgagaagtgtccgttcatatcctttgcctactttttgatggggttgtttgtttttttcttgtaaatttgtttgagttcattgtagattctggctattagccctttgtcagatgagtaggttgcaaaaattttctcccattctgtaggttgcctgttcactctgatggtggtttcgagttttaaatggaagaggctcctaaccgcgaatgtagtgactaactactgcctgacccactcccaccccagtctctcaggagtcacccgaagtttcctctttataataattatcacaaatatatgtaactgaagagaaatagcagagttttgcatccattctcactggatttttgtgtcaaacttgtgagggaaactccttctccccattacaaagaaaacaggctatggccaggcttggtggctcagatgtgtaatcccagcactttgggagaccaaggtcggtggatcacttgaggtcagtagttcgagaccagcctagctaacacggcaaaatcccatctgtactaaaaatacaaaaattggccaggcttggcggtgcgtgcatgtaatcccagctactcagtaggctgaggcaggagaattgcttgaacccaggaggcagaggttgcagcgacccgagattgtgccactgcactgtagcctgggtgacggagcgagactctgtctcaaaaaaaaaaaaaaaaaaaaacaagaagaagaagaaagaaaaagaaaacaggggcttaggggctgacttagttgagttgagatgctgactgcccaagctttttgactcctccacacacaaggctctgtctttttgatttttcttgtttttgtaaacagacatttgctttttttttttttttttttttttttgagacagagtcttgctctgtcgccaggctggagtgcagtggtgctatctcggctcactgcaagctccacctcctgggttcatgccattctcctgcctcagcctccccagtagctgggactacaggcgcccgccaccatgcctggctaatttttttgtatttttagtagagacggggttttgccatgttagccaggatggtttcgctctcctgacctcgtgatctggccgcctcggtctcccaaagtgctgggattacagacgtgatccaccgcgccgagcctttttttttttttttttttttttgagacagggtctcactctgtcacccagcctgaagtgcagtgacatgataatagctcactgcagcctcgatttcctgggctcaagtgacccttctgcctcagcctcttgagtagccgggactacaggcatgtaccatcatgcctggctaactttaaaaatgtttttttgtagacacggattctcgccatgttgcccaggctggtctcaaactcctgacatcaagcaatccacctgcttcggcctcccaaagtgctggaattacaggcatgagaatatgtgataggaaaagagtatacagacttgaaaaaaaatagaacgtttagaaatgaaaaataactattcttgagccaggcacagtggctcaagcctgtaatcccagctactcaggaggctgaggcagaaggattgcttgaatccaggagtttgaaaccagcctgggcaacagtgagaacctgtctaaaaacaaaacagaaacacgcacctcatagctaagtgaaacaggaggcaacatctgggtcattcttagctcatagagagaaataatcagtcattacgtaacaggaaagaaaaatactcaaactatttaaagagcagcaggaatgaaaaagcctgattctgtacttggaaagaatttaaatgcaaatcaactttcacttgttacacaaaagttctaattcaaaaataaattacactagaggtttttcaaggcactttctggaagtgatcattcacagatttttttcaaacttatgcatcatatttaactgcttgtgcaaagtgaagtctgatttttaaaaattattgtaaaatacacataaagtttactgtctgaacaatatatattatatatatagttgtaaaatacacaaaatttattgtctgaactatatattatatataaaatatataatatatagttataaaatacacataaagtttactgtctgaacaatacatatatatatctttttttttttttctttttttttaggtggagtcttgctctgtcacccaggctggagtgcagtggcacaatctcagctcactgcaacctccgcatcctgggttcaagcaattctcctgtctcagcctccctagtagctgggactacaggcgcccgccaccacacccggctaatttttgtatttttagtagagatggggtttcaccatgttggtcaggctggtctcaaactcctgatctcaggtgatcaacccgcctcagtctcccagagtgctgggattacaggcatgagccactgcgcccagccctgtctgaaccattttatatgtaaaatgcactagtattaattttcacagtgttgtgaaaccaatctccagaacttttgcatcacacaaaacacaaactctagatccattagtgcagtggtccccaacctttttgtcaccaggggttggctttgtggaagacagtttttccacagatcggaagcagggagaggtggggtgcttttgagatgatttaaatgcattaaatttttttaaaaaattgagacagggtctcactgtgtcatccgggctggggtgcagtggcacaatcacgtctcactgcagcctcaacctcccaggctcaagcaaccctcccacctcagcctcctgagcagctgggaccacaggcatgtaccaccagacccagctaattttttgtattttttggtagagacgaggttttgctatgttcaggtctcgaactcctgagctcaagtgatatgcctgccttggccttctagagtgctgggattacaggtgtgagccactgtgcctggcctcaagcatattacatttactgtgcactttatttctattactattacattgtaatatataatgaaataattatacaactcaccataatgtagaatcagtgggagccctgagcttgttttcctgtactagacagtcccatctgggggtgatgggagacagtgacagatcatcaggcattagattctcataggaagtgcataacctagacccctcacacgtgcagttcacaatagggttcacctaatgctgccactgatctgacaggaggtggagctcaggcaagtgatggggatgggctgtaaatacagaagctctgctcgttcacccacccactgctcacctcctgccacgtggcccagtgcctgacaggccacagatccccgggggttggggacccctgcattaggcaactactccccattttcccctatccccagctcctggcaatcactatcctactttctgcttctatgaatttgactactctagatgcatcatctaatagtatcatactctttgtgactgtcttatttcacttagcataatgtcttcaaggtttgtccacattatagcttatgtcagaatttcgtatattcttatggctgaataatatcccactgtatgtatatgccgtatttatcaacaggttctcattctcttgcccaggctggagtgcagtgtggtgtgatcacggctcactcagcctcaacctcctgggctcaagcaatcctcccacctcagcctcctgagtagctgggactacaggtgtgtgccaccacgcccagctaattatttttttgtattttttgtagagacagcatttcaccttgttgcccaggctggtctcgaactcctgggctcaaataatcctcctgcgtcggcctgcctcccagagttaggaatacacatgagccaccacgcctggcctgccatatttatctgttcatgcattgttaagacatttaggttgctttcgcttttggctactgcaaataatgctgctacacgggtatataaatatctgttcaagaccctttcaattcttttggatctatacccagaagttgaattgctggatcataagagtaattgtttttaattttttgagcacaggtgatagtttttcacagcagatgcagcattttacattcctgtcaacagtgcacaagggctctcatttctgcacatccttgccaacacttactttctgtaatagccatcctaatgggcatttgtctatagaaatgtgcgcttaaagtaactgagtgtggtttgctaacacactcaggacagtatctgtcacaggataaactctatgttgaatacacagatcagcaaagtttacaagttggaaagagtcttaacactgtaagttatatggccatatggtaattgctttcacaaagctctaaaatgctgcattaataccaagtggcaactcaaactttaagggaagggttcccttgatctttgagcttgacagatgagcaacactatccaggaaatggcattccacaaggacgacgaaatcgcatgttcagaggttcagtcatggagatgtaaaaagaaacatttttaaattcagtatcactgaaggtggcaggcagtgaagctggtgctgactatattccaagtgatggtgggattttgtctacaatattttcttcctaatctttaaaaatatggcttcgtttcctacaactggtttctgagtccttcagatttatgctgtttcatggtgaagttttttaaagacctgattttacccccttattcatgtgaggaaataaaacacaaagagggctggaatgacgtaactcagaatcttccagttcagagacagctggaactgaaactccaatctaggcttttcttcactattccagcagaactttaccaggtctcatcattcatcttcagcctttagagtgagaggattcttaaaagaatggtatacttttgtaaagactaaaaaatccctttgcattaatgcagtgctttgtctttttccaagtgcttttcatcagcacaatctccagatgttaccatgcgcctcctctgccacacatcttaattttcttgaacaagagcacttttgttctagttccaacagtttctctcacactgttctctaataaaaacagtctgcaaagcttaatcccaaccaaaagcaatcaaaaccaaattggaaacagatacactatgaatgcaggaacactatatttattaggtcaataattcatttttagcaatacaagtacagaatatatcacaatgctggttacaaacatacttagtatggtttaatagttacaaataacggtgggcactacaagttggtgagaatgatatgaaaggtcatcctgacacaatgaagaaccgtcttcaaaaatctatttaatgaccttagatatttctatagaaattattgtggcactattagtggggattttcacgtaaagattgttagtgttttgtttttaactgttccattaagaactttttattttgagcctattaaactaaaatcccctgttgcttaataaagtataaaaatagtactgacctggtaatatttaataaaacgtagcattcattcacatcataaaagtagaactgaaaagttttagttaccatggcaaaatatcttcccataaaaggaatatacagaaatgagtaatgttacacaaacggtacctgcaatggttatttagtgatccaacacttaactgtgcaccacaaaccaagttttctagatatctatatataggatatatttttaatcttaaattttactcttgaaaaacatgtgcacttcaacaaactcactaaggccactcatgctatagatacctaggattgcaattaaagaatagtattatgcaataaatcctaaagcacactccttctgattatcaacagggtaaaaccagttttctgcctaaaacattcctgagatttatggacaaaagaagtactgttgaagctggagattaatccaaatgtcatattaacaacaaaaaatttcctagccaggcgtggtggcaggagcctgtaatcccagctactcggaaggctgaggcaggagaatcgctggaacccgggaggcggaggttgcagtgagccaagacggtgccattgccctcccagcctgggcaacaagagcgaaactccgtctgaaaaaaaaaaaaaaaatttcctggcaactaagttcctccacagccaagaggtgaagtacacatccacttctaaagcaaagataaaaccccaaaaactttgtacttatagtgtttttccagtagtaactttgccacccagaagaaaagcaagcagcaaggctacaaattctagggaaaacataaaaagtggcagttaatgatacctgttatgagcaaatcattatttctatgtataaagtttcagccaaaggcttcaatcatgttttggcatgtgttcactgcagttttctgtctgcactattaaggagcagccaaatggcaccttcattatttctaagatcgcagcctctgtacttaattttcataaaattataaacttttcccaacaggctaggaacaaaggtctttctcaaattattttcacaagtgaaaaaatacctgggcaggggttactacaaagcaatagtgagccaatttttaaccaagcagagacagagatttgatggtagtaagggtctcaatccctttggcaaagtcagctttgaggatccataaagattatgctctaaaaattccaattgactctattaaatggaatgcaggcatgagtggccacctgagcgacacatgcgagtgctgacggagctccctgatgcacccaactggagtagcaccgaactttaggaaaagactgggtagaagagtcagagaaggatgagaccaaaggcccctaatttaacataactttgctgaacctccagaaaaatctttaagttggccagggcttccttacgcacctcaccatatgtaaaaagtttgcgcaagttaacttattgtgagataaattttattattttcttcaagatttttaagaaacccaataaatcatagtggcacacatctaacttatcctaaacatccctacttaaaggatgaatcttacacttaaagtcatagggtattattcttcattagaaccagaaataatagcacattaagtcatatccctaaccaaaatggcaatgttttcttaagctagagtgtatgcattaaagtatatggatttacaaaaaaactacattaaagcagtggtgataaggagaaactgccaataatgatgtttcaaaaaaacacaactggctgccaattgacattatcaccctgtgatcctaggcttctacataccatgttgttttatcactgagtgtgagctaagttgagttcaaatggagttagggaggatgaggctgtaagtcatttgtttatttttatcctaggaaatgctgtatgtgcacaaaaccaaaaaatacagattgaaaaaaaaacttcatatggaaacatgtttcaaaatatttattgaaaaacaatttaccatgacattcctataccacaaacataccactggattctaaataaccaataaaagtatacaaagcctatcctgaaaatatctttggaggtattaaatatataggcccatgaggatagagctgagtaacttaaaaatgttagtccttggtcacaaagactatttggtaattaataaagaagtgcctcttgacattagactgcaattaactgaggggtggggggcagcttcataaactgcaagtacgtcaatttactctttccaaaatttaaaaagaaaataattcgatttgaggagtaaactcaggtttctaaatcacacagttaccatcttagggtgtgggtttgcttcatctctttcagtacatcccccaaccaaccccctcctagggaacttaaatgcaatggctcaaaactaataggactgcaaataacagcttcaaacaaggttgggaagttcaaaaaagtgcttaaaatattaataaaatttgaaatctacaacttttctgtactcaatgtggcagacagcttagatttttttcccctctcacccaacatgcatgttaaaagaaaactaaaattcaacacacatccattcacccacagactactccaagcattagctaggagcaacatctttaacagccaagtcatgaacccctgaaaatagggggggaacccagattcttaactatagaagcatcagatgggctactacagtaagaattgaggtaacagcaaaatacctttttgtttcttgaattgctacatgtcacaaattcttaaatttgattattacctcatcattaaataacctgactggcttacaaaaaatcaaatcaaaacccaataaacagaaagacaagttagtgaaataggtgtattattaggggatctttccatttgactcctagatttcaaatgaaatgacctagttgtattactatttaccataaaaatggaggattttctaagacttatttttgggcattcattttcattaatctccataaaccatacagtaacctaacatttccatctgaacatgaactatttcatgacacacagccaatatacttgttaactgcattgattattagggcaacatttaaaatgagggggatggctgcagccgatatttatagacttgcttatggcactgccatctgtgtaccttgactaaaaatatgccattgaaattgccaaacttccctaatttggtatctattacataatttttgcattatcctttttcattatacatctaaatgaaatcattctactgataaaagtatatgtaggatctaaaataataatctaaagcctctggtccaagtaaccaccttctacattaggctggtcctttttagatcctcctggtcctgttagcaaatgctatcagagcatcttgcattgttgtaccaaaaaaaaaaaagtcagaagtgctggtctatcagattttctattacattacagatcaacactggtccagttcagatgaatctgacagtcctttccttgtaatatagagtggttgtatccacttatctgggcaaggtagaaaaacgtaagtcgggatgtccctcttttattagtacttgtgttaacttttctatactgcatataaagattttccgcataaaatttctttacactacagtattgaatacctccacatggaagaattacatattaaaaagttgttaaaatcatccttacataataagaatgcaactcttttaaactcttaaatagttttatttaggggtattttttttctttcaggctttctgcaaaatgaattttttaaaaacaacaaaaaaaagatttcctgttgtttgttctactaggttgaaaatgtgggccagactacttacacatgcggtacatgctgaatataactgaatatatgcttattcctacagacattctgcaagatagggatcacccaaaatagggtcttcaatggactggaccagtgtttcaatgcaaattccagccccccaaaacaacatggttttgatttcacagtatgaattccctggaatccgggaaaaggtaattggttaactgaggtcctccctcagcagctcggtccctcgacattctgagaaatcaggaaggactgcaccacttcttcagtggactgggggctggtgctgacatcttcaagagcatctgtcactgaatattgccgatctcgcaaccggttccagttagacagaacattgtgatattcaaacactttctcgtaatttccaatggagttgtaaagtttaatgagacctcgataatcatattctagtccactgtagccctcaccaaaaagtttcttccctgtaacaaaaaagaaaaaggaaaaaaaaaaaagcacaaataatgagataacaagcaatttctataacatgaacacaagttcaattctttaaacagggtggcttaggtttattcccctgaaaggaatagatataattcttgtatcagcatcccctaaatcagtcccaaccatgagctatcactaagacttaaaaaaaattttctcgtctaaagaagttggcctcattagaatagaattataaaaattcatggtttgaaagaactgtttaaagagatctcaaagaagaatggcagcatctccaacaacagaaaaatacacatgcacaggccagtcatggtggctcacacctgtaatcccagcactttgggaggccaaggtgggtggatcacctgaggtcaagagtttgggactagcctggccaacatggtgaaagcctggccaacatggtgaatacccgtctctactaaaaatacaaaaattagctgggcgtggtggtgcatgcttgtaatcccagctactcgagaggctgaggcatgagaactgcctgaacccaggaggcagaggttgcagtgagccaagatcaggccactgcactccagcttgggtgacagagagagactccgtctcaaaaaaaccaaccaacaaatgaaaaaccaaaacacatgcacaaggctattcactgcaacagtatttgtaattacaaattaacagaaacaaacaaaaacacgtagaatagtttaatcaactgtggtaccttcactcaatggcatattatgtagctgcaaactgatggggaaatttctgggctctctgtaacggttacggagtgactgatggtatattgttaagattgaaaaaagtaaaataccaaagagtatctatagtatgctatcttttgtgtatgatagggaaataagaaaatatttatctgttcattgtgcaaaaagatacacaaaaatgataaaccagaaactaatgagactggttatccatagtgagtgggtgggaactgggtagaagaaatcagagaaaattatatgtatctggacatatctttctgtatagttctaattacagtacgttaatatttcgcatactcaaaaaaattaacaaaataaacaaagatggatggggcaacaatttaacatgttaaataaacctaattgttgtgcaaaagaataacataaccacattgaaaggaaaggggtgtaaataaccccaagtaacttttgaacatagtattctgaaaatatactaccttcgggctagagaaaaaggaaaactgtaaacgaatattgaactctaagtagtaggtctgtttttcacagcggtatgggttagcaactcttaaactacatgcacttgaggaatgagcaagtcagtcaatatattatagataatagggaacccacatgtatatggataaatgatttatgaagaacacagtatagcagagggaaaaaaagagtcttttggccaggagcggtggctcacgcctgtaatcccagcactttgggaggcccaggcgggcaggctgcctgaggtcagaagttcgagaccaacctggccaacacggcaaaaccttgcctctactaaaaaaatacaaaaaaattatccaggtgtggtggtgtgcatctgtagtcccagctacttgggaaactgaggcaggagaatcgcttgaacccaggaggtggaggctgcagtgagctaagaccacgccactgcataccagcctggacgacacagcgagactcttgtctcaaaacaaaacaaaaccaaaaaaaagtcttttgaagaaatggtcttggcttaactctgtgtccatatggggaaaaaaattgatccctacttcacaccataaaaaaaaaatcagtttcaggattgtagatctaaatataaataaagtttcctgaagataattttctagaaaaaaatatctttattactttgggtagaaaaagatttccatatttttttttggagacgtagtcttgctccgtcacacaggctggagtgcacagtgcaatctcggctcactgcaacctctgcccgctaggttcaagcaattctcctgcctcagcctcccgagtagctgggattacaggcgtactgtaccacgcccggctaatttttgtctttttagttgagacggggtttcagcatgttggccaggctgggcttggactcctgacctcaagtgatccacctgcctcggcctcccaaagtgctgggattacaggtgtgagccaccgtgcctggctgaaaagatttcttaaacaatacaaaaagtgctattcacaaaagaaaacactgatgcaggctggacgcggtggctcatgaggcctgtaatcccagcactctgggaggccaaggcaggcagatcacgaggttaagagattgagatcatcctggccaacatgctgaaacaccgtctctactaaaaatacaaaaaattagctgggcatggtggcgggcacctgtagtcccaggtactccggaggctgaggcagtagaattgcttgaacctgggagtcggaggttgcagtaagccgagatcgcgccactgcactctagcctgggtgacagagcgagactccctctcaaaaaaaaaaaaaaagaaaatactgatgcatctgattacattaagaactggctgggcacagtggctcatgcctataatcccagcactttgggaggctgaggtaggaggattacttgagctcaggagtttgagatcagcctgggccaagattgtgagaccttgtccctattgaaacaataaaaaaaaaaaaattagccgggtgtgctggtgcacatctgtagtcccagctactcaggtgggctgaggcagaaggatcacttgaactcaggagattgaggctgcagtgagccctgatgtgcactccagcctgggtgacagagtaagatcctgtctcaaaaaaaaaaaaagaaagaaaaaagaaaaaagaaaaaaagaacttctgttatttaaaaggctccattaggaaacaagcaagaataagagatgatatctatgacacatgtaaccaacgaaggtctgtcatattcatatcatataaagaacttctataagtcaataagaaaatgacaagacaaatcaatataaaaatgggcaagagttttaacaggcacttcataagatgatggccatagattccttattttgattttgtaatagtcctgaaatggaaatccaaatgttccaaatgttcattaatagtggaatggataaatgatgacatcctaatccaacaaatggcagtgatacgcaacatcacagatttcaccattattgttcaccaataaaccagacacataaaaatatacattgtataacttcatcaagttcaaaaacaggtaagcctgatctatgatgttaaaggtaggagaagggagggggaggaatgagtgggcagtaactgcacaaatagtttaaaataactacttttgcctacacatgacagtctactgtcatacctcttactactggcttcagtatcaaaaaaagcacctttagcaaaatgttccagatgatttttgggtggttcctgaatatccttagcaacttatcccatttaaatctattttattttattaaatattttagtattttattttattttatttatttttttgagatggagtctcgttctgttgcccaggctggagagcagtggcacaatctcagctcatgacaacctctgccttccaggttcaagtgattctcctgcctcagcctcctgagtaggtgggactacagacatgcaccatcatgcccagctaatttgtttttgtattttttagtagagatggggtttcaccatgttggccaggctggtctcgaactcctgacctcaagtgatctgcctatctcggcctcccaaagtgctgggattacaggtatgagccaccgcacccagccccatttaagtctttaataacattttccttatacaacatataagacatgctgacatgttgatttgtaatcaactgactaaagaaaatttaaatgtaacataccaattgctatagatcgcaaataaagtttctcagcattttcatactgattcatgtcataattatataaagaagccagatgtcccactgaaagggctacttcataatcttcttgaccaagaagttgttctttaatctgaattgctttgatgtgcatttcttcagcttcctgaaaaacaattatgccatatcaatcattatactttttctcatcttaacagttcttactcaatgagcaaaactgatctaaatgccaaagacatcttatgaatgccataaggtaatcagatcaaagaacatactatgttattccaaaaattgcctatgggaagcattacagagttttggaaactgcagataaactgatgacagcaatagtatcctatgtcaaaagtaacaagtgaaaacttatcctggtaataaaaaattgttacaagaaattcacaacaaagaaatttgcaaaattttaagaaactgttagaagaaattaacaaaacattctaaaacaaaaattacttcctttggttaacacagttaacacagtccaaaatttagttgaaccttcttaacaagctctagatcataatatgttaatttacatgggcatacactttcatttcattttttggaattttgacaatttttattccaacaaactaaactcaagctaattgagggatatacaggttgcttttcaggtaaagaagacctctcactctttacttactgtgatcccaaaattaataatattaagaatttataggctgggcacagtggctcatgcctgtaatcccaacagtttgggaggtcgaggcaggcagattgcttgagcccaggagttcgagatcagcctgggcaacagggctgggcaatagggcaagaccctgtctctacaaacaatacaaaaattaggcagtgtggtggtgtgcgcctgtattcccagctacttgggaagctgaggtgaaaagatcacctgagcccagggaggttgaggctgtagtgagccatgatcacaccactgtactacggcctggacaacagagtaagaacccatattaaaaaatatatatataactcaaaattctaaaatacattgaagttagtcatatttattgctacaactgataatacttgttgcaatatctgacatttcttgcacacctgccatgtgccaggcattctgctaagagctatacttagtatatactaagaattatatatcaagaactatatactaagaactgtttgaaatatagcaatcatatttgtcttttttatttaaaaaattttttcttatctcaagtactactttcatatattaatctttttttttgagatgagtctcactctgttatccaagctggagtgcagatctcggctcactacaatctccatctcccaggttcaagcaattctcctgtctcagcctcctgagtagctgggactacaggtgcatgccaccatgcctggctaatttttgtatttttagtagagatgggttttcaccatgttggccaggctggtcttgaactcctgaccctcaagtgttctgcacaccttggcctcccaaagtgctgggattacagacatgagccactgagcccggcctcatatattaatctttttagtttgacatgtttcctaatttttcatgatcctgtttttttttttgttttttttgaagacaggctctcactctgtcacctaggctggagtgcagtggtgtgatcagagctcactgcagcctcaaccttttgggctcaagtcatcctcttgcctcagcctctggagaagctgggactacaggtgtgagccaccatgtctggctaactttttcttttttgtagagatgggatttccctatattgaccaggctaatcttcaactcctggcctcaggtgattgtcccaccctggactccagtgctgggattacaggcataagccactgtgcctggcccacggtcctgatttttaaattttatttatattttgactattgtttgtttgttttagagatagggtctcactctgtcacccaggctagagggcagtgatgtgatcatagtcactgcagcctcaacttcttgggctcaactcatcctcctgccttagtcttccaagtaggtaggaagacaggcatgtgccaccacacctgcctaatttttgtagagacagggtctccctatgttgtccaggctggtctgaaactcctggtctcaaaggaccctcccatttcagcctcccagagtgccaggattataggaatgagccactgtgcttggcctatgttgttttatactcactatcttctcaattcctttgtgcaataagtgtataatttatttgagcttacttaaaatttattatttcaggttctatttcattacttaagagagaaaaatatagtaaaaacatgtttctaccttaaattttctcattgactgataaagtcttccaaggtttccatagtgttttgcagtctgtacattaaattccccaaaagcttttttagctagttggagtgaagacaggtgcaaatcatgagcttcttgaagcagcctctgttcagtttccttattatgacaatcaattgcaatctcctctaaaataagtgctaaaaaagaaggcaataaattagtgtacttcaaaaccatctaccaaagctagtaagaacatctaatttaaacttaaataatataaatgtttactgaatatatttatatgtgattatggtttggaactggtcaagatgaaagaattccacttttaacaaaaaagtacactttttggtggtcattctattttgcacagtatatatattcaaatttaagaaaaacaatggtataaacgattttgcagaattagcttctattttaatagactgctatactttgctgatgtgaaatttgtttttcaaattaaacggaagcacaaggcaagttttttaaagtcatgaaactgtgtcaaggagtacctaagcacttctgaaaattttgaaaacacactttataaaacataacctttaaccaaacacggctaaaagaactgatttcctcctactcatctgaccaaccaaatcaggcaagacatttcaatttcaaagctccattcaagactttcaaattctatctaaagtcttaagaatatacatattattttaccagataatttgatttattggaaaactgtctatgtacacaaaggtaagaaaaagagatttacttcactgtagcattttttaaaaagaaaaggttaaaaataattataagagtcaaataataaaggtaaggttaaatacattagaaaaaaggatatatgtagagacatgaaaaaatgtaatatattaagtgaaaaaatcagattataaaattaaatcattcatttagttatcttatttgaagtaagaaaagtctaaaataatattcaccaaaatgttgactgaggattggtgggattttaaggcaatttatttttctcttttctatctaacatcatgtattacttgtgcaacttaaaaaatacaaacctagagggagaaaaaactcagttccagaattaaggtagaacatatccaacatgcacggaaataacacataggtgacccaatcatgttagcaaaataaatgcattacgtgaaaaagccttggtggtaatcagaagaaaagttaaaataagaaatggaagataggggtattttgcaagagccttgcaacattcggggtaacctgatacgaagctcaggataagaatcctgcactacaaagctgaagttatgaaacccatcttctattcatgttgtgtagaaacatttgtattatgcttccatgcaatcctcaaaaaaattaatgcatgcatgagtgaatgacaaaagggagagagaaaagaaagaaattctggcttactgatttttttttcttgagacagagtctcgttctgttgcctaggctggagtgcagtggcacgatcttggctcactgcaacctctgcctcctgggttcaaacgattctcctgcctcagcctcccaagtagctgggattacaggtgcacgccaccacatccggctaatttttgtatttttagtaaagatggggtttcaccatgttggccaggctggtctcaaacttctgacctcaggtgatctgcctgcctcggcctcccaaagtgctgggattacaggcataagccaccccatccggcctattaacaatgttttatgagagatgcaaacagtctttcattatgagccactggaaccccttaagtagagttgtggtaaaatggctatctagtaatacatagacaccgtcaaatcctgtgagaaaatcctccaatcctctgagaaaataaacaaatacccctattttataccatatatcatctattttaaaatatctgagactagattacaaaggatacctttcaccctctttgaagaagccaaaagaagatgatcttcaggtaggatgtgggtaatgataccaatagctctttctgcatgaaatctgtaatacagatagatacagtctggcatttctttttagttacaaatgatttaggaattttaaaaatcacaatctgtaatataatattgatagaaagtacttctaaaactatctgtggtaaagatccagctttttgttttaaatttccaatctgttgtagactgaacttttaatacccaacagagactcccatttccctcagaatgagaggaaatctttactacagactacaagattctacatgatctttcagcctgctacttccctgacctcatctcctgccattctcacaccaaccctctccgccttcccctccagccacacaggcctagcagtttcctgaacatgcagagcatgttctcaccctggctttaccctttctataatgctcttcccctgaacattctcacgactcgctcctcaggtctttccagaacagaccacataaaaggccctaaaaaaatttaccactggccgggtgcagtggctcatgcctgtaatcccagcactttgggaggctgaggtgggtggatcacctgaggtcaggagttcgagacaagcctggccaacatggtgaaactccatctctactaaaaaaatacgaaaattagccaggtgtggtggtgaacgcctgtaatcccagctactcagcaggctgaggcagaatcgcttgaacctgggaggtggaggttgcagcgagccaagattgcaccattgtactccagcatgagtgacaaagactgtctcaaaaaaaaaaaaaaaaattaccatcactctctcaactcagcctactttactcttcttcacaacatgtattcttgcctgacaagtttggttatttgtttatggcccatatcaccaaatagaaggtaagctatttctgttttattgtcagtttctttcaaacaatgccaagcctccctctcccccaccctccaggtaaccactagttttctcaaatctgtcttccaatttactaattctctcttttgttgtaactaaacttctgtttaacttgtctgctgaggttttttttgttttgtttttgtttgtttgttttttttacacaggatcctgctctgtcatccaggctggagtacagtgatgcaatcatggctcaccgcagcctcaaactcctgggctcgggtgatcctcccacctcagcctcccggataggtgggttacaggtgtacactgccatgcccaactaatttttttgcattttctttgaagagacagggatttgctatgttgtccaggctggtctcaaactcctgggctcaagtgatccacccaccctggcctcctaaagtgctgggagtacaggcgtgggccaccacgcctggcccatctgctgagttttaatgtcaatgactatttccatttctagccatttgttttatttttataacagctcaagatataattagtataccacacaattcacccatttaatgtgtacaattcaatgatttttagtgtattcacagagtagtatgccaatcaccaaaatcaattttacaacattttcattaccccataaagaaacctatgcccattagcagtcagtctccatttccctccaactccccagcctagataacatcaatttatgttctctctacggatttgcctattctggacatattacataaatgaaatcatacaatatgtgatcctttgtgactggcttctttcactgggcacagtgttttcaaggttcatccatgctgtagcatgtaacagttactttaaaatctgcccttttccagccaggcatggtggctcacatctgcagcctcagcactttaggaggccaaggggggcagatcacttgaggtcaggagatcgagaccagtctggccaacatggtgaaaccctgtctctactaaaaatacaaaaattagccaggtgtggtggcgtgtgcctgtaattccagctactcaggtggctgagacaggagaatcgcttgaacctgggaggtggagagtgcagtcagccgagatcacgccactgcactccagcctgggcgacagagtgacagactctgtctcaaaaaaaaaacaaaacaaaaacaaaaaaacttcctgttttctttatgggaatattcttcattctttcttttatattagagttaacaaagtttttctgtagagggccagatagtaaatattttaggttgtgttgtccacacattctctgctgcaactactgaactctggctgctgtagtgtgaaagaagctatagaaaacacatgaatgaatgagcatggctatgttccagtaaaacataaaactttacttataggcctagttcgtcaacctattttgtatctttaatcatataaagaacacatactttacagcatcaaccaaaaagaagttctggtttttttttttgtttttttttttgagacggagtctcgttctgtcgccacgctggagtgcagtggtgatcttggctcactgcaacctccgactcccgggttcaagcgattctcctgcctcagcctcccgagtagctgggattacaggcgcatgccaccatgcctggctaatttttgtatttttagtagagacggggtttcactgtgttggccaggatggtctccatctcctgacctcgtgatctgcccgcttcggcctcccaaagtgctgggattacaggtatcagccactgcgcccagccaaaaaaaagttctgttaactaaagttttcaggattctaatcctgttcattatgtctgctgactcagaggaaatatttccttatgttttgtaatttttaatggtgagttcattttaggtaaagcttcgtctatgaaatgtctgtatagtttgggttgacagataattatttccaagtcttgcattttctctcacaaggcatcccaggagaaccagcacccccaaagtgctttttaatatttttctgtttgcagatcctgatgcattatccctaaactcaagagcggtataggtaaataattatgttttgtgaggcttctttttgggttcaactgtgacaccaagctcagatggccaactttccctgtcatctattaattagatagatgtccacctgtcctttccctggggttgtagtcccttttttttttttttttttttggagacagagtctcactctgttgcctaggctggagagcagtggcgtgatctcggctcactgcaacctccacctcttgggttcaagcaattgtctgcctcagcctcccgaatagctgggattacaagtgcccaccaccatgcccggctaatttttgtatttttagtagagatggcatttcatcgtcttggccaggcttgtcttgaactcctgacctcaggtgatccacctgccttggcccgccaaagtgctgagattacaggcgtgagccaccacgcccggccgggttgcagtcttgactttgcttcatgtgagggtttcagttctaactcccagcctcctataggctgtttcttaaaccaaggttacagaaatctgtaaactttcccatcaccccagagcagttataccacaggccatacttaatcctttaaattttagtgtccattattggcccttgggggatttccccctcactcttgcaagctcagttatatatttaaaaagacaattgttattcagtatttctatgtgttatcaccaagaagtttttaggttattaagtttgctactgtattactcaaaaattattgaaggaaatactcaaaacataagttatattctgcatgaaaatatacaagtctcaatagtaaatcacataaaggctaaatgaataacctataaattagtatgactttatttatttttggaaacagggtctcactctgttgcccaggctggaatgcagtggtgtgaatatgcttcgctgcatccttgacctcttgggctcaagcgattctcctgcctcagcctccagagaagctgggaccacaggcatgcaccaaaacgtccatctagttttaaaaattttttgagtagacagggtctcaaactcttgggctcaagcaatctttccacctcagcctcccaaagtgctgggattacaggcgggagcctctgcacctgaaaactggtatgattttaaatgacttcaagaacattttaggcattctgataaagctccaggaagacaagttcaatccataaagtatatcaagtactattattaatgtaataatagttccctaatgggaaaaaacaaaataaaacaaaaacagtatttcctccttcagagaaaaggaatgtggaacttacagtgcattgtcaaatttcccagagctatactggtggacataagaagagtaggccaaatcttcatgagctgttgctacgtggatatttttgccaccaaacactgactgtctaatgtcaagggctgcctgaaagaatcataaaaatatttgtcaatactgtagaaaataccacctagttaaattaaacatcctagtaatttaaatatatatctatatgcctaacaccataaaattttgaagcccagaaagtcctgctgtatttaaattacagaacatgaaagtcacctagaagtcctgaatttctgaagatacgagtttgacttaaaaggccacggcttaataataataataataataatcattcctatgtcttgagaatcaagacattgggaatgttttgctctgtttccttcttcaaaagtgaaccttaggccaggcgcggtggctcacacctgtaatcctagtacttctgggaggcaaaggtgggtggatcacctgaggtcagtagttcaagactagcctgggcaacatgctgaaaccgcctctctactaaaaatacaaaaattagccgggcattgtggcacgggcctgtaatcccagatactcaggaggccgaggcacgagaattgcttgaacttgggaggcagaggttgcagtgagctgagattgcgccattgcactccagcctgggcgacagatcaaaactgtgtctcaaaaaaaaaaagtgaaccttgaagtcaagtatgccttgtctacagcaatggcataatacatcatttacctgagaatgagtaagaaagacctaaaataattatcagccatctttgttactacaaaggcagttttagtgacatttgctaaatcaacaacaaagacaagccattacatgggtaaataaaaaatggaaaactactcccacatatgagctcacaacccaataattcctttcctgaatgattttctttaattcccaaagcattaacttttacaccttctaggtaatacttaataaaataatgatgcaacctatattggtgggcggggtagttgtcaaaaagtcatttttagagtggtttatacaccacaaacaaatacaggtcagcaagtcaatacaggttgaaagaaaaaaagggtaaccattaacatacctgataaattgcaacagactgacagatattatctacattgagtaagtagaacccataatctagcagtgtatcagaatattttgggtgtttggatccaaaatgatccctataaaaagacacaaaattattaggatataaagtatagagacaatttaaaaggatatttttaataataatcacctaccgtgccaaatacactgcatgtttaattaactgttctgccttcttaaattcacgttttactacacaagcctaaagataaagtgaaaaatggttaactctcaaacagttcattagtgtgctaaaatacgtgtagtttatatattctggctataagagttaataagaaaaaaaaccctccaaacataaatacaaaggttctatttgtaatttctttccttccaagtacttaaaaattctattataaacagatctgtatataagctgggaaaattataaagtttaaaattttgacagtcagtcctagtacaaatctgtcaaaacaaagttaccttacaaagctggtatacccccattttccgctattattaaaataaaacaatgggggcagaatttaccacagcattttctaaggtccttatatcccagtcctggagtggctgacaacaatcttttgttattttcatttaataatttttaaatgcatagaatttcaagttttcctattaattcttttcttaagagacaaggttttatgttgcccaggctggacttgaactcctggctacagggatgtgccactgtgcacagctctcagttgttattttgatccatgattatagctaggcattttctaaaaactctaaatataatttgcatatagaaatataaatcttgtggccgggcacagtggctcatgcctgtaatcccagcactttgggaggccgaggcgggcagatcacaaggtcaggagatcgagaccatcctggctaacacggtgaaaccccgtctctactaaaaatacaaaaaattagtcgggtgaggtggcgggcacctgtagtcccagctattcaggaggctgaggcaggagaatgatgtgaaccctggggggcggagcctgcagtgacccgagatcgcgccactgcactccagcctgggcgacagcaagactccatctcaaaaaaaaaaaaaaagaaaaaaaaacccagaaatataaatcttgcataaatattatgttgtctttatattaatattcaattatttcaattaattaaaaacgtaagaatatccctgttctagctctgataacttaaatatttatgctgtttacttactctaaaatgactgatttaataaatttcagagaaatattagactctctcagatctataattttggaatctattttctagttgaatttccataagtaaaatcaaccaaaatgaaatattcaaatctgagaaacttcagggtagaagagtgtatctgaaaagtacattaatgctttaagtcctcactgcaccaaaggagtagttttaaaatactactaaatgtcctcaaagagttaacgcaggccaaccgtggtggacctgtaatcctagaacttttggaggcttgcctagaacttttggaggctcaggtgggaggatcgcttgagtccaggtgtttgagaccggccagggcaacatagtgagaccctgtctctatttaaaataaaataaaaatgtaaaagatttaatgcatttatttacagaataagaaaacactagagaaaaatcaagtaaggactgcctagcaggtcaagtatagcaagctgccttgctgtgagactgcaatactatgacaaagagatttaacaccaggctatctttagcagaaaagtgaccaaagttcacaggattttggcataaggaattctggttgctataaatatttaagaaaaacaaaaacaaactcaagccagaatagcacccaaatactactttgagctgtactttagtgcactgaaacaatgatcaaaatgaattatttcactggttttcttggtaaagaaaaattggctaaaaatctatgtgtgatatagttttagttagaaaccagatttctaaaaatgagcacagaaacttataaaacagacctatgcctacggagtgtacaaataactaaaatgttaaataacaggttaattaaaacaaacttaaagcctgataaatcctataattcatttaataattttaacattatatttaccttagaagcttgtcttaagacatccaccacaactttcactggtaagcctgctgtaatttctttcattgcctcgatgcaccatttgtatgcctaaaaaaattatttatagaagagacagaactgtggttaaatcaagttgacaatatttaacaagatgactgcaaaatttttctacaagcacttaaataagaacacacacaaaatatttacagttagaattttctgaggctaaactttcttcaaagtataaatctgttatattatttttactcttaatatctatagcttatctgaatcagacgttgtggatacatgacatatcttctggaaatcagaggtatgttctctcttgcccagaagcctttgcacatactgttccctctgccttaaaatacattcccccttcctccaaccccttaaactcatctgtcttgtggggtttcctgtgttttcctatacattccatcctcctattgtaacatttgttattttatgtctgaattgtctgtttagttgagtgtttactttgtcccagctactgtccaaagtattttatgtgcattaacacatttacctgacaaaacagccctataagatacgtactattaggggaaacaggtgtagagaggttaagtggcaggtaatgtgctagtatctaggtatgaagtgggaaacaaaaccaaaaatgtccttcctctcctggtgcttagtggaagaaataaaaaaggcaaaataaattgtcttaggctgggtgtagtggtgcatacctgtaatcccagcactttgggaggctgagatgggaggatcgccaagctcagaagtttgaaaccagcctgggttataacatagtgagactttgtctctatcaaaaatcaaaaaaattagctgggcgtggtgatgtgcacctgtagttccagctacttggtagagctgaggtggaggctgcagtgagccgtgatcatgccactgcactccagaccttggtgatggagtgagacgctgtctcaaacaaacagacaaacaaacaaacaaagacaagtgtggccatgtgatttctttccacaattaaaatatgagaagtgaaatgtgccacttctggaagaaaagtccaagagccggcagtacttctccatgaagtttctgcccctgtgcccaggctggtaatgttctagatagatacgttccagatagacccaaaaccacgctgtgtcttgatcaaagcgtaggtataatgttaagaacagccatagccatctgaagacagggatatattatgagccagaaagaaacttttattgttccaagctattctggggttgatattacctctgcataacctagcctatcctaacacaaaaacatgatgctaattcatcaaaccatgtctgtaagatttgtgtacttttctgtagatatcagtgaaaagcttatttatcactagaagattgaactgtcaaaattatccaagacttcaacattcctcacgaatgtgctgagagctgcaaagacatgaataaggcacagtataaacccctaaatccaaatgtagaaggaaaataactgtcaggctgggcatggtggctcatgcctgtaatcccagcacttcaggaggccaaggtagaggatcacctgagcccaggagtttgagtccagcgtgggtgacaaagcaagatcctgtctcaaaaactacaacacgaggcccaaccaaacaatttaggcaaatatttggttaaattaaaagaaaaacaacaaaagaaagggctctaaattacacatgtatatatttcaaattcacctcacaaacactccttttgcctgattttttatttttttgagacagggtctcactctgtcactcaggctggagtacagtggtataaatatggctcactacaccctcaacttactgggctcaagggatcctcctgcctcagcctcccatgtagttgtgaccaccacaggcgtgtgctacacatgcggctaattttctatagaggcagggtctctctcactttgttgcccatgctggccccaaactcctgggctcaagtgatcctctaccttggcctcctaaagttctgggattacaggcatgagccacagtgctcggcttgtctgattttaaattttccattacaaatgtgtactgccttatataaacctaatatgtaaaagagatctgtaagaaaaataagagaagactatttgatttaccctctgtttttataggtacttattggtcacagtgaaatgtaccttaaaacacttacctcatcatagtgactttttgcaaataggagtgcacacagttctccatagagtgcagctttatttgcttgctggccatgttttgatagtttatccatatatgtctgagctaatttaaatgtttcttcacccaaatgatatttgcagtttccatttcgcacatgaagcaacctataaaacaccaataacattgctctatttttgatattttcagcttggtagacctgatgacctcttaccaatcacctgaatgacttaaggtaattaaatacaattacaaggcagcattgaaaataagtgtgtggcccaaattggagttgacctcatgcccataaagaagtacatgctctttcctgaaagcgtcccataattcatctcatcaattgttgattccttctctaaatattttatatattttatgtactcagcatgtactgcatctaaaaaaatgacatttaatctttttgttccaaatccacaagtaatatagcttcagtataagaaacttggaaaataatgaagaaaataaaattgacataaaatatcttcttttcttatttttggtatagtctaacacttgatcagttaccacttatttcatgatgcttcataatgttcattttttccaataagataaatttaccgaaaatagcagtagtgtcaactatttcttttaaaatctttatcctctatagtagaaatacagagttctttaaacaaattaactgtacaactatgctgactatttaatgatatgcaaaaatagtacaatgctttagatcagactggtctagatagcaacagactgtgtatctatatagactgtacaagataggcaaatagtgttaggactggacaaatatttatttatttatttatttattaaatgctagctagaacattatgttcatgtatcaagccaatacaactttctgaaaatgctcagactgagaaggaacaaaggtataaaagctatttaaaagaaaaacaaggatggacaggttaggaagtattcctcaggagcatcaaatcaacagatacaaaaaatttattttttctatctataccacaattattaacagattagtaactcataatgagaaaaattcagacaatcttttaatctctatcattcctctgtatagtcacagaaacagattaacttccaaagaaccaggactaatcaataaagtgatgactactatacaatgccaatgtgtatcctcccaacacgtaccatacaattatctgcaaaatctattaccataagcagcttatgttctagtggtgagaagggtattagtgtgggcaaagataaaatacgtaagactttcatttaaggataaatgccataaagatgataaaaaagtagggtaatatgatcaaaagattctgaaaggaggtatttagggtagacagggaagaatcctcctgaggtagtaacatttaagttgacatctaaatgatgacactgtagccagccaagtgaagatctggtggggaagcatgttccaaaacagaaggaacagcaaaacagaaggaatagcccctgagaagggatggggggaaatcctggcatagtcaaaggaacagaaagaaggccaattcatctagactacagtgaataaaagattatgtaaagagaaatgagaagggagagataagcaagattttatagcaccttgcgggccgtggaaaggagttttgtttgcaacagtaagggaggtgatttgacttatgcactatctaatataatttcctgagatgttagaaatgttctatacttgtgttgctcaatttggtagccactagccacagtggctactgagtattagaaatgtgcctagtgtgactgaggcacattttacttttaattaatttaaacttaataatcacatatggttaatggctaccatatgggacaatgcaactctatcaagaatgctctggctacactctggctatagcaaagccaagaggggaagcaaagcaaccaaggcagaagatactgtaacagtccagaaaaaaaagtccttgagaaaaaaaggattagtatttgaaacacagatttgatagccaaatggttgaaagagaaaaaaatgagaaacccataggttgaaaatttagagaataaaaagaacagtgcttacttctcatttccacaatgctaagaatttcctttccaaagaccttcactgtaagtattctcctgaaataacaatctgtggaaattatttagtaattggcacatgatgaagtagcaaaataaacactgtatgccagaaaggcacagcttggtattttctccagtccctgctgaatgtctatttaaacaaaagggcaaattaaacatatggagactctttaggttctgtgtgtccatctgggctgacactaagcagtatattgaatccaaggaacttgtggtccaacttattatggtctaattttatcccaaccttctgcctaaggaaaaaggaggttctcaaaatgtggcactaccatgtaaacacagtattttactttcataacataaaattatgtctacctgatcaacacctactgtcaagaacaattactatttgattgaactattcattgtttaaaatgaaaaatatacaaatgtgtaagtcattagtttactaatatatttaccataagactgaacatgactagttagagcctcatcagccagacatgacgaaagtaaaatacactgaaagtgaacctaaaggaaaagaatttctctccttcttgtaagtgtctttttcttagaactagtttatcccagcactttgggaggccgaggtaggcggatcacgatgtcaggagatcgagaccatcctggccaacacgatccccgtctctactaaaaatacaaaaaaaaattagcttggcatggtggtgcgtgcctgtagttccagctacttgggaggctgaggcagaagaatcgcttgaacccaggaggcagagattgcagtgagtcgagatcacaccactgcactccagactggcgacagagcaagactccatctcaaaaaaaaaaaaaaaaaaaattggaaataaatgatagcttgaaaggggagagctgcataatgaaaataaagaccggtatgggtttaataatttttttttactatggtgaaatatatataaaactttgccatatgagctatttttaagtatacaattcagtggcattaattatattaactatgtcatgcaaccatcaatactatccacttccaaaactttttcatcaccccaaacagtccctagtaacctttaatctactttctgtctctatgaatttgcctattctacatatttcatgtaagtggaaccatacaatatttgtccttttgtgtctaacttatttcacttaggataaaattttcaaggttcatccatgttgtagcatgtaccaaaactggctgaatcattgtatgtgtatatatgtaaatgccaaattttgtgtatctatttatctgctgatggatacttggattgtttttatcttttgacttgtgaaaaattctgctataaacactagcacacaaatatctctcgattccttgctttcaatgcttttaggcatatacttggagtgaaattgctgagtcatacagtaattctatgtttagctttttgacaaactgccaaactgtactccacagcagctgcaccattttacattcccagcaacagtgcacaaagtttccaatttctttttttttttcaaatgctctctcagcagaatcacttgatttcttctcatccttgccaacagttattttcttttttttaaactgtacccatcttggtaggaataaagtggtagctcattatgtttgatttccatttccctaatgctgaatgacactatcttttcatgtgcttatcttttcatgtgcttaccggtcttttgtgtatcttccttgggaaaatgtctattcaagtcctttgtccattttttatttttaattttatgagacagagtctcactctgtcacccaggctggagtgcagttgcatgatcaagctcactacagccatgatctcctgggcttaagtgatcctcccacctcagcctcctacgtagctgagacgacaggccagtgccaccacacctggctgatttttaaaaaaattattttaatagagacaaggtcttgctattttgctcaggctggtctcaaactcttgagctcaagaaatccttctgcctcagcctcccaaagtgctgggattacaggtgtgagccaccatgcccagcctgctctttattaattaattaattaaatttttaacagagtttcgctcttgttgcccaggctggagtgcagtggcacaatcttggctcactgcaacctctgcctcctgggttcaagtgattctcctgcctcagcctccagagtagcttggattacaggcgcctgccaccatacccagctaattttcctatttttagtagagatgggtttcaccatgttggccagactggatttttttttttttttgagatggggtcttgctctgttgcccaggctggagtgcagtggcacgatctcagctcactgcaacctctgcctcctgggttcaagcgattctcctgcctcagcctcctgagtagctgggattacaggtgtgcaccaccacgcctggctaatttttgtattttttttttcagtagagacagagttttatcatgttggccagactggtctcaaactcctgacctcagatgatctctctgcctcaaactcccaaactgcttggattacaggtgtgagccacagggcccggcctcatttttaaattctgttgtttgtagttgtagttcttgatatattctggatactagaaacttaattgacatgtgatttgcaaatattttctcccattccataggttgtctttttattttcttgatgtttttgatttacaaaagtttttattttgattaagtccaacaaatctatagttttacttcttcctttccaatactgatgatttttatttttcttgtcgaatttcttctgctaaagcttccagtacaatgttgaataccactagtgaaagcaggcaactatgtcttgttcctgatcctatgggggaagcttctagtctttcactatagagtatgatgttattgtgagtttttcataaatactctttatcatattgaagaagttcctttctattcctagctttgtgaatttttttttttaatcatgaaaaggtgttagattttgctaaatgtcttttctgtgtcaactgagataactgggttttttttttttcccttcatcctattaacatggtgtatcacactgatgttcttacgttgaaccacccttgcattcctgggataaatctcactttgtcatagtgtaaaatccttttaatattctattagatttgatttgctagtattttgttgaggattttttcatccatattcataagagatactcgtctgaaattgccttttttgtgatgtcatttttggtctttggtatcagggtaacgttaaccttttaaaacgagttaggggctgggcgcagtggctcatgcctgtaatcctagaactttgggaggccaaggtgggcaggtcacctgaggtcaggagttcgagaccagcctggccaacatggcaaaacctcgtctctactaaaaatacaaaaattagccaggtgtggtggtgggagcctgtaatcccagctacttgggtggctgaggcaggagaatcgcttgaacctgggaggcggaagttgcagtgagccaagatggtgccactgcactccagcctgggcaaaagagtaagactctgtctcataaaataaagcaaataaaatgaaaatggaaacaaaaacaaaaacaaaaacaaaacaaaacaagttaggaagtgttccttcctctgcaatttcctggaggagtttgagaagaactagtgctaattctttaaatgtttgatagaattcactagtgaagtcttcagtcctggactttgttggaaggtttttgattatggatttaatttatttacttgttataggtctcgtaagattttctatttcttcttggggcatttaggtaaattgtccatttctaaaaaatttgtccattttatttatgttatctaattcactggtgttcaactgttcataggattcaccttaaatccttttcatttgtggaaggttggtagtaatgttccaagtcccatttctggttttagttatttgagtcttctgtctttttctttgttagtctggtatggttttaatttcaagtcagggaggacatcagtgtgagagtgtttcttctgctagagaacgtggaatctgcacctgacacctcaaaccatggcagcaatcttacaagcactggagagctagccaaagaaatgactggtacacaaagaattagcagacagattgaaagaatctagttccttaataacctctatatattcagaattaacctaccctggaggcccttaacattgtactgattatctttttatcaaagtttttgtacttttaaggtacactgcttatgtaggtggctcctatcttatttgctacacataggtttatgacatttttgtgaattatacattctattatcaatatcccttttgtattaactaatgacttttatcctgaattcttccttattgttagtattattgttttggggtgtttcctttttatgatatagcactagttttaattttttaaccctcttggtaactgccatctttaggtaggagaattgagcccatttacatgtattgtgatgataattatatttggtctaaccttttcatcttatttttcacttatcataatcagtttgttcctctattcactttgcttatatctagcttggtcaagtttcaaatcattctcacccatattcacaccaccctagtttggaagttctatcacacttttctattacacaaggcatcaaatgcccatctctagcactgataatgtttaaactaaataatgatgccctttcctactctacccactaagatgagaactctgtaacacttttactcatccattctcccaaatgcatattttaaaaataggctatatgtctattaaaaaacaacctgaatgtaagatgaacctccattttccatctaaaaatatttttgccaactcatatatatcaagttttagggatatatgtgataacattaaaacacttataatttatatttaaggccaggtgtggtggtcatgcctgtaagcccagtattttgggaggccaaggcaggaggatcacttgagcccaggagtttgagaccagcctgggcaacatactgaggtcccttttctattaaaaacaaaaagaataaaaatttataacatttaaatctttccttataccaatatatttaaaatctaaattaaattttcaaaaatcgcttttcctcctcacaatttacaaaactttatccaaattattcacatgtaccttaaacatttagcttcatcatcaccatagttatttgagtcatctgacagtttttattttatcttttaaataaatccttctttggaatgacagctttttagagtaaaacattttcacttgtttgaaaaccagtacttctgaatctctgtatgatgtcatcagaaatttaatccaaagctaccagtaaccatctgcaaagcattaggactgctgggcttttcaatttctcctatggcaagcagatatccaggatctccagaactgaattactccatcacttttcaaagtaatctttaaaaagccagttaataaaattatccaactcttaaaactataaggtcatgacctccagaataattctaaatctgttaaatttcattttttttttattttttttttttgagacagagttttgctcgtcgcccaggttggagtgcaatggtgcaatcttgactcactgcaacctccacctcccaggttcaagcgattctcctccctcagcctcccgaagtagctgggatcacaggcacccaccaccatgcccagttaatttttttgtatttttagtagagacagggtttcaccatgttggccaggctggtcttgaactcctgaccttaggtgatccacccaccctggcctatcaaagtgctgggattacaggtgttgagccaccccgcccagcctcataacttatttagaaagaaaatttcactaggtgatctctataaagcttcctgacatcagcactaactgaaatttcagcttaacatttctttcctaaatactactttgttgttcaaaatacaggttgagtatccttatttgaaatgtttgggaccaatcatgtttcagatttcaaatttttggattaggaacactaaacctgtaataggtttgacgtggtaaatttttgttttttgttatttccaaaatttccttttcatctctggtttgaaaagaatcctcatttaaggcctattacaaattctcaatttgttcttcattctcttcctactccatttacatgtgagacatatattacaatattcattacctaccactgtttttatactgtcttcccctaccttgggatttgttattattaatttaagaacttaaataaaagtttaaaatttttattttaaaataaaatagaggccaggtgcagtggctcacgtctgtaatcccagcactttggggggccagggcaggcagatcacgaggtcaggagatcgacaccatccaggctaacatggtgaaaccccatctctactaaaaatacaaaaaaattagctgggcatggtggcgggcgcctatagtcccagctactcgggaggctgaggcagaaaaatcatttaaacctgggaggtggagcttgcagtgagccgcgatcacaccactgcactccagcctgggcgacagagactccatctcaaaaaaaacaaaaacaaaaaacaaaaaacatgactcagacataacatgacatgacataacataacatgatagtttcattatattgcccaggcaggtctcaaactccttggctcaaacgatcctcctgccttggcctcccaaagtgctgggattacaggcatgaggtaccatgccttgctggaacttatatttggttacagaagttcctcgattatttccctcagatacggtacatggagatatactgggtcttcatgtatttgaaaattacttcttttgcccttcaaactggtgaggtacagtattttctctcagtaactaagatactgctactttcttctagcttctaatttctatttatctttggatttcaggaaattcagctgcccagggttctctttcaatccacattcaactctttatacacacacacacacacacacacacacacacacacacacacacgctccccaaccccaccccacagtccagtagttcaagaagttctttttattatttaaaaaaacccaccaaaggaatacatgtcaatggtttaaaaacataataaatagtagaaaaggatttaaaataaaaagtaagtttgttctgcccaactctcacaagcccaaaagcaatctctgttcccttatctggaggttctagagaattcctgaccttaaacaaaccatgctcacatggactgattagctccaaagaaaaaactgaaaagggggttgcgggtgtgattttaagtttgtcatcccccaaaaacaagccagttcagtaactgtagttatttctgagcagcagggttatagacaacaattttcttcctcatagctttctgtattttctggatgtgtttggccagacatgtataagcaagaaaaacaaagccattaaatagaaaatgaataaatggaaataggcagagtctccaaagaatacaaaaggactgaaaaatggtaccagttttaactactttctattaagaaaggctaggaaggttctctgacctttgttgtataatgttttgatgttagccccatattagaaattggctttgtgacattaaattgaaaaatatacttttattcttgcatcaggctcaaagcccctgggattggccaaagcatttgattagtatctgttgtgcaaaacacttcttttctaattcaattaaacacatggtcaattaataccccaaatttctctctgccttaaaaaaaggctaagtcataaaattttaataatcttttcaaataatactaagtagatgaaaaaaattacttattataaataaattatattaaatacacctgtaacggccaagaatttggcaaggttagttgaatagaggcaaattttattgtgaaatttcaaattcataaagacataaggtcttggtatacaggcagtgagctggcattataaatggctttgttccttggtccagacaatattctagtttcacatgtgcttgctaaaaagacagctagttctgaattgttaattatctattgtttttaatttattttaaaattttttatagaaatgaggtcttgctggtctccaattcctaagctcaagcaatcctcaaatcttggcctcccaaagtgctaggattacagtcgtgagccactgcacccagccagttatctacccaatattcctcatgttttcttccttaatgtagacccatgagttcattcatgcacaattaaaaatgttttgctcctcagactatacttattacacagattagaagttgtgtagaatgtgtcccagtttccagtttaaaagacaagtaatccaagagacagggttagacttctgggaaagcaatttttttctgatttaaaaaagagtcagctggcatgcactttttgacctcccctcttcttactgcctattaacacttgcagccataatgatgtgagctacttgctacagatgacaaactaggaaggagagaaggagactgacttgtcttgtgagaaaactaaaccttttggtaaggctaaagccaaatttatacaggaaccttaaaatcagaagaaacacaggtatttgggtgaaataaatctgaatatgtgaataaaaaaataaagcacatacaaaaaagaaagtgttttatcttttggtcaagattgccatagtgaataatctatgataaaaatcatacaaaatcccctttctgttccaaattaaccagtttatgtacatagcaatatataactaacctcccaaatcccatatgggataatgtagtctcctattcctaaaaatataaaataggcagaagagggggaaaaaaatgagagattatttttatgagtactataaattatagggctaaatactaatccttttagagtttctgcacacaaatattcctataatttatcatacacttccaaagtatatgtgggaaattatcaccttctaaaatattatttataattaagtttgcatattacaaaattaacttcaggattgaatgtctgtctgacatagataagccttgtataaaaaaggtcaatgacagcctcaaaagactgaaatccaactggccaaaaaaaaaaaaaaaaaatagagttttactcaattttagcttaaagcaacaataatctggctgggtgtagaggttcatgcctgtaatcccagaactttgggaggcccaggcagaggattgcttgagcccaggagttggagaccagactgggcgatacagcaaaacaccatttctaataaaaataaagtaaaaaatatatttaaaaaaaaacccaaaacaaaaatacaatggttttataggagaatattctaggtttgaaagggttcagattcaattaactcatctaaaaaatacctaggaaatatgaaccttaattccataaaaatagaagactgtaaattcaataaattgattggactttagttaccttacgataaagaatttctgctgtttaattttttgactttattttaattttcctttagttttatataaaaaaatacttttaagaaatgccaaatcaaattgggggacaaagagaaaacctgtatgaaaatagctaaaggtaaatgtaacatgcagaaaaaaataaggacaataaagcagagttacttctagatttgcttgactttaaggaaatctgtaaaaaagtaataaatgtatactcaaagaaaagttattcataagtaaagcactaatcttgttatgcacaattatggaaatgtaaacaaagcagggggtacaaaagtaacaccaaagaaaaagtacatttctggagtttccgagcatccagtgtctaccacagttcctagtacacaagcattcaataaatatttgttgaatgaataaacaaacaagctctatgacaaagcaaaaagatatgtaagaaacacattctgggccaggcacggtggctcatgcctgtaatcccagcactttgggaggccaaggcaggtggatcacctgaagtcaggagttcgagaccagcctgaccaacatggcaaaaccccatctctactaaaaatacaaataattggcgcatgcctgtaatcccagctacttgggaggctgagacaggagaatcacttgaacccaggaggtggaggttgcagtgagccaagactgtgccactgcactccagcctgggtgaaagagcgagactctgtttcaaaataaaaataaaaaaagaaacacattctggttcataatactcaaatctaacctaagctgtctacagcagattaactatattttagagatgagaggatgccagactagtgaaactatgacatataaatatcatctcagagatttactcaaatgttggcatatacttataagagctaaaactataaaagccactaaatactgttatagcacgtaattacaggatatgttccaacttacctcacacaacattctactgcacgaaaccaatgaagcatctcatcgtgtagagtacacaactgaaggcaggacagaaaaactttctcagcatcactgtaccagcctgcatctgaaagaaagccacctaaaaaaataagaaacaccaattttagaaaacttgataaatagcctgcaagataaaatgacatgctgacagtgaatattacctaaattaaaaataaaccatgatagtaaaatcttgtgtttagcatacaacacaggtatgaactgtgagatttttatataaaggttttgaactacgggaaggagggttaaggctaagaccttgaataaggagtcaaaagtttgaaccttctaagaatactccatggcctaagagttgttactttccagctaatgagctaactaaattattttactattttcatcttggagtgtacatataactttagcatctcccaatacacaatcccaaagaagataaatctgaatatacttagtatagcagcacataacggaggatacacagataaaaaaagactgtgatccttaatcgattatcttattatttttttaaacaagaaattactgtcctgggcagtatttcctcagcatattatctttttgaggattctgcctcctaaatatgactaacatttaatacactgttactacaccatgtaaaacacttcgtattgtggtaactacataactacacgaactcactcatttaactttcacaacacaccttcgacttaaataactgccccaacgtaacagatgaaaacacttgagtcacagaaaaaccaaagcttataatccagtaagtgaaaagattcagatgcacacaatgtgacttcagaggctaagtctgtagtccctatactgcaacagttattaaggaataatttcttagtgctattcaggattagttacaataaccagaaaacacaaagtaacataccatcatggtatgttctaaaacacatttttttgcacattaaaaaatctctgaaattatctgagaccagcctgggcaatatggcaaaatcctgtctctacaaaagatacaaaagtaagccggatgtggtggcgagtgcctgtagtcccagctactcaggaggctggggtgggagaatggcttgagcctgggaggcagaggctgcagtgagcggagatcacaccactgccctccagcctgggcaacagagccagccagaccttgtctcaaacaacaacaacaacaaaactctgaaattagagtacgtcataaaagtaatggtatattacaataagtggctttttcttggcacacaaaaaatatggtgtcttaatagtattaatgtatgagttgacaaaatattatattttgcttagactcatgttttatatttaattaaaactacatgtaattaagcatttttttaattggagagaactgtgctttaaaactttctagcttcctcaccaagttgagcagaataatgagattattcatattcatactaagcaatattctacttatcatcccaacatattgtatattgtgctggttattagaatactgtctctcagcttcaaacccatactactagagtctgtttgaggatgctgagcaaggactctgcaaaccacatttctcctttgctagctggctccgtttggctcagcgaataggaggcactggagaaatgggctgcatgactggaagagcaatggacactctccttcctgtatctgttagtgaggttcctgctgacaaaaacaccccagggtgtgcttcttttctttggtggtagttcattccattaaataatagtcaataccagttgcagttttccaatgcttgcaaaaccagtttcacagcactccatcaaacatcagcaatagccatccaggttgctcctcctagaggtctagatcctagacccacgggccctcttttcagacctctgaggcaccagtaacagcctagcagtatcccagcttcatggggcaaacccctccaactcctactttttaataattccaatctctttccttggttccccaagccataggtatggtagccaattctcacagctgctttgtccataataccctactgttccctttttgcctctttagttctctagtatctggttaaaaacgatttgtattaggccaggtacagtggctcatgcctgtaattccagcacttttggaggccaaggtggaaggatcccttgaggccaagagttcaagaccagcctgggtaacacagtgagaccctgtctcctaaataaataaatattttttatgctgataattgattttatagcctagtgaaatgaactattcagatataacatctacttcatccacatcttgttgagaaggagaaaatttatacaatgtacttaattttatttggttcttagtttgacaatccctaaaaatttaggtttattctagagcatgacaaagtcaaaacttgtaatattgaccctagaattcacctaaactcaaggaaaatactacaatagagctgggcttcagctaagtcaaatccagaaccaaatttattttctctgttcaaaacaaatgagatccttgttttcaaaagaagttaggaaaagaagacaacagcacaattgtggcagctgttacagcttcttacaatgaccatttgtgcttgaaaatgaagtggacatttgctgttaatagaagtatcaatccagtaaccacaggataggttactatttctttttttagagacagagtttgctcttgttgcccaggctagagtgcaatagcgtgatctcggctcaccgcaacctccgcctcctgggttcaagtgattctcctacctcagcctcctgagtagctgagattacaggcatgtgccaccacgcccggctaattttgtatttttagtagagacgggtttctccatgttggtcaggctggtctcaaacttctaacctcaggagatccgcccacctcagcctcccaaagtgctgggattacaggtgtgagccaccgcgtccggccgggttactacttcgattaaaaacttaattttaagaaatgtgttccttgactataagcatcaaattaaatacttataaacaagaaataaatgaatccaaaccattttaaaaacatattcctgttaagaaatgtttaattttccctttgaatagcctcatcccaataaagatgtggcctgtcagaaaagggcttgaatgtccagggtgatagtcctacttagtaatgcagtcctttctaaaagacaattcttttttattttttaggattaaaaatttattattattatactttaagttctagggtacatgtgcacaacgtgcaggttacatgtgccatgttggtttgctgcacccatcaactcgtcatttacattaggtatttctcctaacgctatccctcccccagaccgccaccccacaacaggccctggtgtgtgaggttccctgccctgtgtccaagtgttctcattgttcaattcccacctgagtgagaacatgtggtatttggttttctgtccttgtgatagtttgctcagaatgatggtttccagcttcatccatgtccctacaaaggacatgaactcatcctgttttctggctgcatagtattccatggtgtatatgcaccacattttcttaatccagtctatcattgatggacatttgggttggttccatgtctttgctattgtgaagtgccgtaataaacatacatgtgcatatgtctttatagtagcatgatttataatcctttgggtatatacccagtaatgggattgcagggtcaaatagtatttctagttctagatccttgaggaatcgccacactgtcttccacaatagttgaactagtttacactcccaccaacagtgtaaaagtgttcctatttctccgcatcttctccagcacctgtttcctgattttttaatgatcaccattctaactggtgtgagatggtatctcactgtggttttgatttgcatttctctgatgaccagtgatgatgagtattttttcatgtgtctgttggctgcataaatgtcttcttttgagaagtgtctgctcatgtcctttgcccactttttgatggggttgtttgattttttcttgtaaattcgcttaagttctttgtagattctgggtatcagcccattgtcagataggtagattgcaaaaattttctccattctgtaggtcgcctgttcactctgatgacagtttctttttttttgagatggagacttgctctgtcgcccaggctggagtgcagtagcgcaatctcggctcactgcaagctctgcctcctgggttcacgccattctcctgcctgagcctcccaaatagctgggactataggcgcccaccaccacacctggctatttttttgtatttttagtagagacggggtttcaccatgttagccaggatggtctcgatctcccgacctcgtgatccgctcgcctcggcctcccaaagtgctaggattacaggcgtgagccaccgcacctagccgatggtagtttcttttgctgtgcagaagctctttagtttaattagatcccatttgtcaattttggcttttgttgccattgcttttcgtgttttagacatgaagtccttgcccgtgcctatgtcctgaatggtattgcccaggttttcttctacggtttttatggttttaggtctaacatttaagtctttaatccatcttgaattaatttttgtataacgtgtaaggaagggatccagtttcagctttctacctacggctagccagttttcccagcaccatttattaaatagggaatcctttcctcatttcttgtttttgtcaggtttgtcaaagatcagatggttgtagatgtgtggtattatttatgagggctgtgttctgttccactggtctatatctgttttggtaccagtaccacgctgttttggttactgcagccttgtagtatagtttgaagtcaggtagtgtgatgcctccagctttgttcttttggcttaggattggcttggcaatgcgggctcttttttggttccatatgaactttagagtagttttttccaatcctgtgaagaaagtcattggtagcttgatggagatggcattgaatctataaattaccttgcacagtacagccattttcatgatactgattcttcctattcatgagcatggaatgttcttccatttgtttgtgtcctcttttattttgttgagcagtagtttgtagttctccttgaagaggtccttcacatcccttgtaggttggattcctaggtattttattctctctgaagcaactgtgaatgggagttcactcataatttggctgtttatgtgttattggtgcataagaatgcttgtgatttttgcactttgattttgtatcctgagactttaaggaagttgcttatcagcttaaggagattttgggctgagatgatggggtttcctaaatatacaatcatgtcatctgcaaacagggacaatttgacttcctctcttcctatctgaataccctttatttctttcccttgcctgaccgccctggccagaacttccaacactatgttgaataggagtgatgagagaaagacagaaaactgtcttgtgccagttttcaaagggaatgcttccagtttttgcccattcagtatgatactggctgtgggtctgtcttaaacggctattattttgagttacattccataaatacctaatttattgagagttgaattttgtcaaaggcctttcctgcctctattgagataatcatgtggtttttgtctttggttctgtttatgttatggattacgtttattgatttgcatatgttgaaccagccttgcatcccagggatgaagccaacttgatcttggtggataagctttttgatgtgctgctggattcagtttgccggtattttattgaggattttcgcatcgatgttcatcagggatattggtctaaaattctctttttttgttgtgtctctgccaggctttggtatcaggatgatgctggcctcataaaatgagttagggagagttccctctctattgattggaaaagtttcagaaggaatggtaccagctcctctttgtagctctggtagaatttggctgtgaatcagtctggtcctagacttcttttggttggtaggctattaattattgcctcaattccggagcctgttattggtctattcagagattcaacttctttctggtttagtcttgggagggtgtatgtgtccgggcatttatccatttcttttagattttctagtttatttgcttagaggtatttatagtattctctgatggtagtctgtatttctgtaggatcagtggtgatatcccctttatcattttttattgcatctatttgattcttcttttcttctttattagtcttgctagtggtctatcaattttgttgatcttttcaaaaacccagctcctggattcactgatttttttgaagggttttttgtgtctctatctccttcagttctgctctgatcttagttatttcttgccttctgctagctttcgaacttgtttgctcttgcttctctagctcttttaattgtgatggtagggtgtgaattgtagatctttcctgctttctcttgtgggctattagtgctataaatttacctctacacacagctttaaatgtgtcccagagattctggttcgttgtgtctttgttcttattggtttcaaagacatctttatttctgccttcatttcgttatttacccagtagtcattcaggagcaggctgttcagtttccacgtagttgtgtggttttgagcgactttcttaatcctgagttctaatttgactgcactgaggtctgagagacagtttgttgtgatttctgttcttttacatttgccaaggagtgctttactttcaactatgtggtcaattttggaataagtacgatgtggtgctgagaagaatatattctgttgatttggggtggagagttctgtagatgtctattaggtctgcttggtgcagaactgagttcaaatcctggatatccttgttaaccttctgtctcattgatctgtctaatattgacagtggggtgttaaagtctcccattattattatgtgggagtctaagtctctttgtaggtctctaaggacttgccttatgaatctgagtgctcctgtattgggtgcatatatatttaggatagttagctcttcttgtcgaattgatccctttaccattatgtgatggcctcgtctcttttgatctttgttggtttaaagtctgttttatcagagactaggattgcaacccctgcttttttttgctttccacttgcttggtagatctttctccatccctttattttgagcctacgtgtgtctctgcatgtgagatgggtctcctaaatacagcacactgatgggttttgcgtctttatccagtttgccagtctgtgtcttttaattggggcatttagcccatttatatttaaggttagtattgttatgtgtgaatttgatcctgtcactatgatgttagccggttattttggccattagttgatgcagtttcttccgagcatcgatggtctttacaattttgcatgtttttgcagtggctggtaccggttgttcctttccatctttagtgcttccttcagaagctcttgtaaggcaggcctggtggtgacaaaatctctcagcatttgcttatctgtaaaggattttatttctccttcacttatgaagcttagtttggctggatatgaaattctgggttgaaaattcttttctttaagaatgttgaatattggcccccactctcttctggcttgtagagtttctgctgagagatccacggttaggctgatggggttccctttgtgggtaacctgacctttctttctggctgctcttaacattttttccttcatttttatcttggggaatctgacaattgtgtgtcttggggttgctcttctcaaggaattatctttgtggtgttctctgtatttcctgaatttgaatgttggcctgccttgctaggttggggaagttctcctggataatatcctgaagtgtcttccagcttggttccattctccccgtcactttcgggtacaccaatcaaacgtagatttggtattttcacatagtcctgtatttcttggaggctttgtttgtttctttttactctcttttctctaaacttctcttctcacttcatttcattaatttgatcttcaatcactgataccctttcttccactagatcgaatcggctactgaagcatgtgcatgtgtcatgtagttctcgcgccatggttttcagctccatcaggtcatttaaggtcttctctacactgtttattctagttagccatttgtctaatcttttttcaaggtttttagcttccttgcgatgggttcgaacatcctcctttagcttggagaagtctgttattaccaaccttctgaagcctacttctgtcaacttgtcaaagtcattctccatctggctttgttccattgctggcgaggagctgcaatcccttggaggagaaaaggcactctggtttttagaattttcagcttttctgctctggtttctccccatctttgtggttttatctgcctttggtctttgatgatggtgacctacaggtggggttttggtgtggatgtccttttagtttatgtcgatgctattcctttctgtttgttagttttccttgtaacagtcaggtccctcagctgcagtctgttgggagtttgcaggaggtccactccagaccttacttgctggggtatcaccagcgaaagctgcagaacagcaaatattgcagaacagcaaatattgctgcctgatccttcctctggaagcttcgtctcagaggggcacctggctgtatgaggtgtcagtcagcccctactgggaggtgtctcacagttaggctacacgggggtcagggacccacttgaggaggcagtctgtctgttctcagagctcaaactccgtgctgggagaatcactgctctcttcagagctgtcagacagggatgtttaagtctgcagaagtttctgctgccttttgttcagctatgccctgaccccagaggtcaaaaaatattatttatattaaattctgtctctataacatggatggattttgaaagtattatggtaaataaaacaagccagtcacaaagaccatgtatttcaagagtacacttatataaaatgtccagaacaggcaaatctatagagacagaaagtagatgatgtttgcctggtgttggagagaaatgggagtgactgctaatgggtactgttttctttttggggaggaaataatgttctaaaactttttgtggtgatgtctgcaaaactcttctggtatgactttttcctcttgggtaattttaggattaagactgataactgtgagtttgccaggacttggttctctctccaaggtatctagttgggtcattataatggccagattggcataagtagatgtggagatgatagaggacctcaatgaacactagtcttcctttcatcttctttcatactaaatttctctcacacacacatttttacatgatcatatagaactaaagggatatcatccttaacattagtcaagatcacaagttttgagagactttctttggacaattctttgtcgctactgacatttccataagactatttaaaaaataaatgctggccaggcacggtggctcatgcctgtaatcccagcactttgggagactgagctgggtggatcacgaagtcatgagtttgagaccagcctgcccaacatagtgaaacctcatcactactaaaaatacaaaaaattagctgggtatggtggcaggtgcctataatcccagctactcgggaggctgaggcaggagaatggcttgaacccgggaggaggaggttgcagtgagctgagatcacactattgcactccagcctgggcgacagtacaagactctgtctcaaataaaaaaaaagaaataatgagggtccttttcaaaaaaatatgctctgaagtcccttcggcaacctgtctttggctactacaaagaattattctaagattaaacaggccaggcacggtgcctcaggcctgtaatcccagcactttgggaggctgaggtggacagatcacctgaggttagcaatttgagaccagcctggccaacatgataaaacaccatctctactaaaaacacaaaaattagatgagtgtggtggcgcatgcctgtagtcccagctacctgtgaggctgaggcagcagaatcacttcaacccaggaggcggaggctgcagtgagctgagatcgtgccactgcactccagtctgggcgacagagtgggaccatgtctcaaaaaaaaaaaaaaaaaaaaagattaaaaatgactgttaaaagttgttgggaaggatgtatacgcacgtgtgtacactttaagacagaaaacacatacatggcacatgcacacagtaatgagagaagttaaaaacaaaagtagggctgggtgcagtggctcacgcctataatcccagcacttttggtggcagaggtgggtggaccacttgacgtcaggagtttgagaccagtctggccaacatggtgaaccccgtctctactaaaaatacaaaaattagttgggtgtggtggcacacgcctgtaatctcggctacttgggaggctgaggaaggagaatagcttgaacacaagaggcggaagttgcagtgagcaaaaatcatgccactgcactccagcctgggtgatagagtgagactccatctcagaaaacaaaacaaaacaaaacaaaacaaaacaaaaacccccaaacaaaaatagtttgtggtgatcaaatagtactgtatcttgatagtgatggtggttgtacgactctacatggaatccaccgcacagacacacatacaaacaaatgagtgcacgtaaaaactggtgaaaactaagtaaggccagtagtctagttaatggtataacaccagtgtcaatttcttggttttgatattgccctacagttatataatatgtgaccactgggggaagctggaggaatggttcaaagaactctgggtactcttttgcaacttcctatgaatctacagtcacttcaaaaaaagtttgtttaatagagaaaaaagagccaagtgcagtggctcatgcctgtaattccagtagtttgggaagaatgcttgagcccaggagttcaagaccagcctgggcaacatagcaagaccttgtctcaacaaaaataaaaattagctgtgtatgttgacacatgcctgttgtcctagctactcgggaagctgaagcaggaagactgcttgagcccaagtttgaagttacagtgagctatgattgttgatatggtttggctctgtgtccccacacaaatctcatcttgaattgtagctcccataattcccacattatgggagggacctggtgggagataactgaatcatgggggcagtctccccaatactgttcttgtggtagtaagtctcacgagatctgatggttttataaggggtttcccctttcatttggctcattctgttttgcctgccaccatgtaagatgtgccttttaccttccaccatgattgtgaggcctccccagccacgtggaactatgagtccattaaacctcattttcctttataaattatccagtctcaggtatgtctttaacagcagcatgaaaatgaactaataaagtaaactggtgccagcagagtggggagctgctataaagatacctgaaaatgtggaagcaactttggaactgggtaacaggcaaagtttggaacagtttggagggctcagaagaagacagaaaaatgtaggaaaagtttggaacttcctagagacttgttgaatagctttgatcaaaatgctgataatgatatggacagtgaaatccaggctgaggtggtctcagatggagatgaggaacttgttggaaactggagtaaaggtgactcttgctatattttagccaaaagactggtgacattttgtccctgcctcagagatgtgtggaacctttaacttgagggagatgatttagggtatctggcagaagaaatttccaagcaacaaagcatttaagaggtgactggagtgctgttaaaagcattgtctcatttatttttatttttttatttttatttttttgagatgaagttttgctttgtcacccaggctggagtgcagtggggtgatctcagcagtacagtgaggcgatttcaactcactgcaacctctgccttccaggttcaagtgattctcctgcctcagcctcccgagtagctgagattacaggcacccgccaacaggcccggctagtttttgtatttttagtagagatacggtttcaccatgttggccaggctggtctcaaactcctgatatcaaaacaatccacccaccttggcctcccaaagtgctgggactagaggtgtgagctactgcacccagtcagcattcagttttaaaaggaaaacagagcataaaagtttggaaaatttgcagcctcaggatgcgatagaaaagaaaaactcattttgtgagaagaactgcaagctggcagcagaaatttgcatgagtaacgagcagccaaatgctaatctccaagacaatggagaaaatgtctccaggacatttcagagaactttgtggcagcccctcctatcacaggcccagaggcctaggaggaaaaaatggttttgtgagttgagcccagggcccccctgctgtgtgcagactagggacttggacccctgtgtcccagctgctctactcatagctaaaagggaccaacgtacagcttagaccatagcttccaagggggcaagtcccaagccttagcagctcccacatggtgttgagcctgtgggtgcccagaagtcaagaattgaggtttgggaacctctgcctagacttcagaatgtatgggaacgcctgcatgtccaggcagaagtttgctgcagggtgaggtcctcatgaaaaacctctgctagggcagtgtggaagggaaatattgggttgaagcccttacacagagtccccactggggcactgcctagtggagctatgagaagagggccactgtgctccagaccacagaatggcagatccactgaaagcttgcaccgtgtgcctgaaaaaaccacagacactcgacgccagtccgtgaaagcagctgggagggaggctgtacccttcaaagccacaggggcggagctgcccaagaccatgggaacccacctcttgcaacagcatgacctggatgtgagacatggagtcagaaaagatcattttggagctttatgatttgactactccactggattccagacttgcatggggcctttagctccttcattttggccaatttcttccatttggaatggttgtatttatccaatgcatgtacccccactgtatctaggaaataactaacttgcttttgattttacaggctcacaggcagaagagacttgccttgtctcagatgagactttggactgtggactttttgagttaatgctgaaatgagttaagactttggaggactgttgcgaaggcatgattggtgttgaaatgtgaggacatgagatttgcgaggggccagggtggaatgatatgatttggctgtgtccccacccaaatctcattttgaattatagttcccataattcccacgtgttgtgggagggacctggtgaaagataactgaatcatagggccggttccccaacactgttttcatgctagtgaataagtctcatgagagctgatggttttataaggggtttcccctatctcttggctctcattctcgtctgccaccatataagacatgccttccaccttccgccatgattgtgaagcctccccagtcatgtggaactataagtccattaaacctctttttgctttataaattacccagtctcgggtatgtctttaatggcagcatgaaaacagattaatacaattgtgccactgcactctagcctgggtgacacagtgaaaccctgtctcaaaataaaataataaaacaaaataaacaaaaaaggtagcaaaaactttaataagaaattgcctgaaacacacatctaaacagatttgtgaaaaccatataaaattgtatacatacattaaacaatatttttctacatgtatagcacacaaaacatttttctaactacttttatatttatcatttatttttaatttttttgttttagagaggaggttttgctatgttgcccaggctggtctcgaactcctgggctcaagtgatcctgccacctcagccttctaaagtgctagaattacaggtgagaaccgccatgcccagccttttttttttctttttttttttttctgagacagagtctccctgttacccaggctggagtgcagtggcacaatctaggctcaatgcaacctccacctcccaagttcaagcaattctcatgcctcatcctcccaagtagctgggattactggcatgcgtcaccacactcggctaattttttgtatttttactagagacaggatttcgccatgctggccaggctggtctcgaactactgacagtgatccacccacctcagtaacccaaagtgctaggaactacaggcatgagtcaccatgcccagctctatcacatatttttaaggtctcactatgttgcttttacatttcttttcactatcctcataacatccacatgaggaaatacagaataaccctcattttagagatgggaaaactgaggctccgaaaggatgaagttctctgccacagcctacagtaagcaggtcaaagaggctggtggcagcatgacatggtagaaaaacacatattatggaatcacatagacacaggaatctaaacttagctctactactagctatgtgacttgagccagttactcaacttttctgagtctgtttcctcatttgtaaaatgctattaataccatcacttcgttggaatgtcatgaggatttagaaagatactatttaaatgtatagtataatgctttggcatggggttaagtggttctgatgttcttctcataaccttcttacgtagactttgggaaagccctggaagaattctttgttagcagatttaattctgagtccatcacaggacaaaatacttctgttccaccattacttacctaaaacaaagccaacctgaatggctttttcctttactgcagcatctgattctgctatataagagcaccgcctactgaatgagtaggccaagactgaagcaactttaacaccatgatccatcaaagcctgaaaacaatgatgaagcaaatgtctgtaagaaaagaaaaagattattttatagagttaatttatttttctccttttagaaagtgctaactgcttctcttttaaataatagcaccattattttccaggacggaataagataaaaagcattttgccttatcaattacaaggccataattcaaaatttagcctaatctcttcactcagtggataactgagtgatcctacaacattcaggaaaagtacacaatgtgtaacttgatgacaaggaaggatgaagctaacttttaaaattggcttttaaaaaccaaattataattcacaataaaaaggtacataacccagtttttaaaaggcaatgaagatagaagagttttttttgttttgttttgttttttttttttttttttgagatggagtctcactctgttatccaggctggagtgcagtggcgtggtctcggctcattgcaatctccacctccctggttcaagcgattctcccgcctcagcctcccaagtagctggaactacaggtacgtgtcaccatgcccaactaatcttttttgtatttttagtagagacagggtctcaccatgttagccgggatgctctcaatctcttgaccttgtgatctacccacctcggcctcccaaagtgctgggattacaggtgtgagccaccacgcctggctgatatgaacagatatttctccacaaaagatatataaatgccaataaacacgaaataagaggctcaacatcattaatgattagggaaatgcaaaccaaaatcatgagatacccctttacacccaatagaatttttaaaaatattttatttatttattatttatttatttatttatttatttatttatttatttatttatgttttagagacaaggtcctgctctgtcatccaggctggagagaagtggcatgatcatagctcactgtagccttgaactggtctcaattaagatcctcctgcttcagcctccacagtagctgggactatggatgcctgtcactgcaccctgctataattttttttgaagtgttgtcatgaggtgaaaaaacgggaaccctcatacattggcggtgggattataaaatgatatggctgctgtgaaaaagtgtagtggttcctcaaaaagttaatcatagggttaccatattatacaccctaggtatatactcaagagaattgagactatatacacacaaaatattgtccaaccacattcacagcagcattattcataatagccaaaaggtggaaacaactcaaatgttcatgaacagatgactggataagcaaaatgcagtattatccttacgatggaaaattattcagccataaaaaaggaaagtagtactgatgcaagcaacaacatgaatgaaccttaaaaacattatgctaagtgtcagtcacaaaagaccatataagaatcaacttatataaaatatctagactaggcaaatccagagagacagaaagtagattaatggtcagctagaaactgaggaaaaagttactgttaactgaggaaatggtcagccaagaggaaatggagttgactgttaatgatttctttttgtggtgaccaaattttctagaattagacagtggtgatggttacaaaatcttgtgaatagttgaatggtagaatttaaattggtgaattttatagtgtgtgaatcacatttcaatagaaaaaaaaccttttaaacaaaattgtaagagtcactgctttgggtaaaggaaaaaaaggtcaaattacatgcttttagtttcacaaatacataaaacacttaccaaaggatttggacttggtgaaagataacctaagagatgaaaaagaggtattccactgaatctttacaacagccacgtttaaaactacctacagagattcaaatccccaaaagctatcctttctttagagtaaggaatgtttttaaaagtttttctagtcttcttttaccaaaatgagaagttcttatttattagatttttttttacagcctaactttaatcaactaatcaagaagtttctctataatcttagcacacaggccacatttcaaagttacccttgaacactgaaatcatgctgtttacttacttattttattttttttgagacagagtctcactctgtcacccaggctggagtgcagcggtgtgatgttggctcactgcaacctccgcctcccgggttcaagtgattctcctgcctcagcctcccgagtagctgggattacaggcatgagctaccacgcccagctaatttttgtatttttagtagagacaagatttcagcatgttggccaggctggtcttcaactcctgacctcaggtgatccacccaccttggcctcccaaagtgctgggattacaggtgtgagccaccacgcccagccgacttacttgtttattatcttatcatctctctctaaaatacaaactccatgaggaagggaccttgtggatcctactcactgctatggccccagcatctaaaacagtatctggaaaatgtgctatatatacacaatggtgtactatttggccataaaaaagaatgagatcctgtcatctgcaacaacacggatggaactgtatggtaagtaaaagaagccagccaaggaaagaacaactttgcatgtagtcacttatttgtgggagctaaaaattaaaataattgcattcatggatatagagaggagaaggatggttaccagaggctgggaagggtaactgggagaggggggcaaatgaagatggttaatgggtacaataaaatagaaagaatgaataaaatctagtatttgctaacacaacaggattatagtaaaaaataatttagttctacattttaataactgaaagaatataactggattgtctgtaacacaaagaataaatgcttgaggtgatgaacacctcatttatcttgatgtgattattacacattgcatgcttgtatcaaagtatcttatgtaacccataaatatatgcacctaatatgtatgtactatgtacccccaaaaacttaaaataaaacagtacctggaacatattaggcactcagcaagtatttatttaatttgttgaataaatgctaacaacttggtaagattcttattagagatcagcagtattttgtgaaactatattcttattttcctagaaatgtgggttaggaaataaaatggcagttaaacttagggaagaacactaaagagaacagcaagcagaccaggcacggtggctcacacctgtaaccccagcactttgggaggccaaggcaggtggatggcttgagcttaggagtttgagaccagcatgggcaacatggcgaaaccccatctctactaaaaatacaaaaaattacccaggcgtggtggggcatgcctgtattcccagctacttgggagtatcacctgagccctggaagtcgaggctacagtgagccatgatcttgccactgcactccaggctgggtgatggaagtgagaccctggctccaaaaaaaaaaaagaacagcaagtacaatgaaaagccagatctgtagctactactactacatgatgatacttaaaacgggaagatgaattcaatctccctttcttgaactcaaaaagctaaacttccaaagtgttaactttccaaaggggatagaaggaggcagaacaaattatcttctctttgtcaccaagcttctgtttgggttgtacaattactgccacaatatttttactatattctctatgatgctggcaaagacttcttgagttgtcttaaattgctttcaaattctacttctaggtatgtatctaatagatatgcatacatatgttcaccaaaaaacatttacaagaatgttcagggcagcaagagttataatagctaaaaagtggaaacagcccaaatgtccatcaataatagaatgaataatactgtattcacataataaaacaccatatatatatacagcaacaagaatgaacacactgtaattgcacataacataggtgattctcataaaacaatactgggggaaaaaaaagccagacacaaaagggcacaaactgtataattgtatttaatatgttctaaaatacataaaatgaatctagtggttaccctaggggaggggaagtagtgactggaaaaagacaagacaggggttctggtaacaactgcaaataaacataattcatagtgaaataataccaggtatatggaaaaactaattgagacaatttctcaatgaaacaactttatagatttatattggtactatacttatgaggcaaaattattttatccactctaaattttctgatataatcatatttatgaaataatttctaaaccacataagaaattagtcaaaaataaacgtaacttcatgcattaaaaagaggtgtaatggaattttaaaaaacaagtaacctaaaaatgaaatttatgtcccagcactttggaagactgagacaagaggatcacttgagcccaggagttcgagaccagcctgggcaacacagcgagacctcatctctactaaaaataaaaaaattagctgggtgtgatagcatgcgcctatagtcccagctactcaggaggctgaggtgggaggatggctttgagccaaggagagtttgagtttgcagtgagctacgaacatgccactgaactccatcctggcaacagaacaagactgtgtctcaaaaaaaaaaaaaatatggaaaacagtatgacagttcctcaaaaaaactggaaataagagttgggtgcagtggcatagcgcctttagtcccagctagcagagaggctgaaaaacgaggatcccttgagcccaggagttcgagggcagcctgtacaacatagtcaaactaagtctcttaaaaaataaacaaaagtagaattaccatataatccagcaattcaacttctgagtatataaccaaaataactgaaggcaggggcttgaagagatatttctacgctcatgttcacagcagtattattcacactagccaaaaggtagaaagaacccaaatatccattgacagatgaatagataaacaaaatgtggtatatgcacacaatggaatataatctagccataaaaagaaatgaaattctgacttgtactacaacatagataaaccttaaaaacattatgctaaatgaaatacaatacacacaaaaggataaacattataaggattccacttatatgggaaatcagagaagtcaaactcatctaaagtacaatggtggctacacaggataagggaaagagagaatggggagttactatttagtgggtaaggagtttttgttcagggtgattaaaaagttctggaaatgaatggtgttgatggttgcacaatgtgaatatactttttttttttttttttgagacggagtcttgctctgtcacccaggctggagtgcagtggcgcgatcttggctcactgcaagctccgcctcccaggttcacgccattttcctgcctcagcctcccaagtagctgggactaaggcgcctaccaccacgcccagctaattttttgtatttttagtagagacagggtttcatcacgttagccaggaaggtctcgatctgacctcgtgatctgcccacctcagcctcccaaagtgctgggattacaggcgtaagccacagcacccagcccacaatgtgaatatacttaatgccactcaattcggttaaaatggtaaattttatgttatgtatattttacaattttttaaaaaagaatttaccttttatccaaagctctcagtactttagcaaaaacttccaattcacaaaattcactgcccagttgacataagcgtccctgttggtaaagctgaaataaaaaacaaatgatttaaaaattttgcaatttaattcttctttttactttaatcatatttgataaatgtaatttgattaatttcaggaaagatgcttatgttaagagaaatgtaacactaacaaatttctacaattcatataaaaatattttaatagttgcatataatcgttacaaattggtatttgtaaaccacctagaacagtacctggaacatggcaagtactacaaagtgctgtataattatgtattcattaaatacagataaaaatcatgttaaactgttaacttttttacttaaacaaaactggagagtcggtgtaaaattatcaaaataatagcaaagataatgtccagaaaacagagctggtcaatatggccacctcaaaaatctcagttcagtcctggttataacacgtcaaaaacacaccaatagtagagcatgtcaatagtaatacaggatggcaggatttctaattatgccataatcgtttatacattctgactttttagaactacaatttaaaataacattttaaggctgggcgctgtggtttgatcctgtcattccagctactaaggaggcaaaggagggagtattgcttgaggccagagtttgagacaggcctgggcaacatagcaagaccctatttataaaatataaataaattcgctaggtgtggtggcatgcacctgtagtctcagctatttgggaggttgaggcaaggggactgcttgagcccaggagttggagaccagcctgggcaacatagtgacaccctgtctctagaatacacagcctgggtgagagtgagaccctgtctcaaaaaaattataaataaataaacagaaagacaaatactattgtccctccctgcaaccccgcctcaatgtcaccaaatgctttttgagacagtcttgctctgttgcccaggcaatacaatacccaagagtgtgtagtggtgcaatctcggctcactgcaacctctgcctcccgggttcaagcaatcctcccacctcagcatccctagtagctaggattacaggcatgcatcaccatgcctaattttttttttgtatttttagtagagacggggtttcaccatgttggccaggctggtcttgaactcctgacctcaagaccaaatgcttctaaatttacacatgctatataaataatacagtgccttagaaagcaggatttatttgactttatattacaggcatttaacagctcagttgatgagaacatgggtttcataaagaaaacaaggtcactctccaaatgggccagtttacttggtgcatggaaaacataataaaacctcagcacactcctgggcataaatcactagtcacaatggaggtcaggtcgaattaggtaaatatattaatccaaatccataatgactgcttcaaaaaatctgtaactcctggaggggagaggggacagggaccaccacatgctcacgaaggaaaggcagaaatgttatcttcatgtaatagttagacatttatgttaacattaaaaccttcagcaagaaagatttgttatttttatttatttatttatttattttttaatggtcttactctgtcatccaggctgcagtatagtggcacaattatagctcaatgcagcactgcagtctcaaactcctgggctcaagtgatcttcctgcctcagactctctgagtgctggggttacaggcgtgagccactgcgttcagcctatatttgctatccttatagaggactctgttttctgctatagaaaagtaagagcttctgggaatgcatgctgtaaaattcactactattaactgctgtcttatttacttgacaaccaaaacagaataactcagggaaagtaaagctgagaacttacgaccacattcttataacatgggcttaacaaggtgataaatttctgatttgcgacacaacagttaccaaaataaatacaaacatacactccaaaaacactaagacaacaatcttagcttcttaccaaaatgactgacttttcattatcaaacttaaggcttagaatttctttttaaaaaaagaataaacaggctgggcatggtggctcacgcctgtaatcccagcactttgggaggccaagggggggtggatcagctgaggtcaacagttcaagaccagactggccaacatggagaaatcctgtctctactaaaaatataaaaattaaacaggccatggtggcaggcacctgtaatcccagctactcgggaggctgggagagaatcgcttgaactcgtaagacaggttgcaaggagccaagatcgcgccactgcactccagcctgggtgatggagcaaaactctgtctcaaaaaaaacaaaaaaagaataaacaaaaacaagttatacaactactttgcctaaaaacaaaattttatgttatcttacaattcactgcattcctttaatgactgaaactggtgtatcctactaaatgagagtctatatttgatatttggctgtttaaattttcttttttttttttttttgggacagagtctctcactctgtcaccaggttggagtgcagtggcatgatctcagctcactgcaacctccacctcctgggttcaagcgattctcctgcctcagcctcccgaatagcctggactaccggcgcgggataccacgcccaggtaatttttgtatttttagtggcgacaaggtttcaacatgttagccaggatggtctcgatttcttgacctcatgatccgcccgcctcagccttccaaagtgctgggattacaggcatgagtttctctagttaaaatgcgctcacatttaaattgacgggaaagggtaatttgtttcaactcatccttaccaagtttatctaaaaaatgcaaagtaatttttttttttttgagacagagttttgctcttgttgcccaggctggagtacagtggcgtgactgactcactgcaacctccacctctcaggttcaagtgattcccttgcttcagcctctggagtagctgggattacaggcgcccgccaccacgcccagctaatttttgtatttttagtagagatggggtttcaccatgttggccaggctggtcttgaactcctgacctcaggtgatccgcctgccttagcctcccaatgtgctgggattataggtgtctgccaccgtgcccggcctgaaattaagacattttatgaattaaaggggtttttggataccaatccagaaaaaaaataacttctaatcttttatgtgtcaggcactgttgtcagtgcttttcataaattattcattttatccttttacagatgaggaaactgagtcatatacagttaaataaccttctcaaaatcatataattaggatgggcaaagcaggaatcttacccaggcagtctgtccctacatccatgttcttaacaacttaccctatattgcctcttgaagataatataaaaggaaatttttaaaagtattaaatggacaatttaaaatatttttatagaaatgatggaagatttaaaggttaatcccctcatagattcaaacatcttatgaaacagagcttagaagagaggaaactgatactttttgttccagtaatgattctcatataagatttttaaaacttattttagtttatattatgtacccgtagcataatgaagctattaaagggctatatcaaccactttcagctgttcctaccttaaacaaaagggaaaacaagcttatttctagaagtaggcaaattatcacccaccagatataaaaacagataataaaatacaattaaaacagtattatacagttatgaagatagatcaaccaacagaacaaaatgcaaagttcaaaaacagaccttagtgtatataaatatcaacgtatgacaaaagaagcattttaagatcactgaggaaagaaaaaaattacttaataaagagtgcataaaaatgggtaaacaaagatgcctacctgataaaatgtaacaaaaaggaattccagatttatcaaagttttaaatggtaaaaaattatatcatagcagtattaaaagctacctgctaacattgctttcctaagcatcacatcacataaaattcaagatcagcctggccaacatggcgaaaccctgactataccaaaaatataaaaatcagcccggcatggctgcgtgtcccaggtacttgggaagctgaggcataagaattgcacaaagtcaggaggcggaggttgcaataagctgatattgcgcactgcactccagcctgggtgacactgagactcttgtctcaaaaacaaccaaccaaccaaaaaacacctatgttctaagaaaaactgaaggcacataattgcatgcacacactcacacataccaatgaaacctgtgcatctcattcatgtttggaactttctcagagagtctttaaatagccaaaacttcagaaatgaaaaggggttgttatcaaggaaaaatggccatgttatatgaagtgaacaagttcctgaaacgtgtaataaaattccacttttgcttctaaattgtatatctacattatatatgcatccatataaaaatctgaaataatacaatgcttatatatatggtataggattaatatctcaaatatttcacctagattactgtaaaggtttgatagaattagtccctccattaccactcttgtctccctcaaaattacggtccacacagtaaccagaataatcttgtaaaaaagtaactcatatcatgccattctcttgtttaaaacctttatttaaatggcacccccaatgtagaacataatccaaaatcttttctttttgagacggagtctcgctctgtcgcctaggttggagtgcagtggcacgatcttggctcactgcaagctccgcctcccgcgttcacgccattctcctgcctcagcctccagagtagctgggactacaggcgcctgccaccatggccagctcattttttgtatttttagtagagacggggcttcacggtgttagccaggatagtttcgatctcctgaccttgtgatccgcccaccgtggcctcccaaagtgctgggattagaggtgtgagccatcgcgcctggcccataatccaaaatctttattaatgttacctctgagatcctaaaagccacctgacccctgcggtttttttttttttttttttttttttttgagatggagtttcactcttgttgcccaggctagagtgtagtggtgccacttgggatcactacctctgcctcccgggttcaagcaattctcatgcctcagtctcttgagtagctgggattacaggcgcccgccaccatgcccagctaatttctgtatttttagcagagatggggcttcaccatgttggccaggctgttctcgaactcctgacctaggtgatccacctgcctcggcctcccaaagtgctgggattacaggtgtgagccaccatgcctggcctttcttttttttttctccctgggagacagtctggcctctgtctcacaagctggagggcagtggcatgatcatgactcactggagcctcaatctccttcctgggctcaagcaatgcacccacctcagccccagatagtagctggtactacaggcatgcacaaccatgcctggctaatttttccattttttctgtagagatggggtcacactatgttgcctagcctggtgtacaaactcttgggctcaagtgatactcccacctaggcctcccaaagtgctgggattaccggcctgagccactgcccctggccttgacgcctgcctatatttctgacctcatcgtttactattgtttctccctgtctcctacactcctgccaccttagctttcttttggctcataacttttgcacacatatgctactacctctacatgaagcactggtaacatgattctttgcctggttagtttataactcatccaaatcctctcaactacactatgtcacttcctcacagagctcttcccctgactcagcaatctaaattctatgtcctgttaaactttctcatgacacactgttttttttacctccacagtagcattaagacatgcatgcattcacttaaacagtcatttgttaaatatattattccatcacactctacattctatgaggtgactacagtcaccactatattcccaatacctagcacagtgcctagtacaagatatacattcaatattttcttttttaaaaaaaacattttccccccgggcgcggtggctcgcgcctgtaatgccagcactttgggaggccgaggcgggcagatcacgaggtcaagagatcgagaccatcctggccaacatggtgaaaccccgtttctactaaaaatacaaaaattagctgggcgtggtggcgggtgcctgtagtcccagctacttgggaagctgaggcaggagaatctcttgaacctgggaggcagaggttgcagtgagctgaaatcacgccactgcactccagcctggcgatagagcaagactccatctcaaaaaaataaaaattttttctttcttctcttttcaaaaattttagattcaggggtacatttgcaggcttgttacacggttatattgcataatgctggggtgtgggcttcaagtgaacccatacccaagtagcaaaacagtacccagtaagtagtttttcaatccttgccacattaaatatttttcttttttctttttttttttttgagacagagtctcattccatcacccaagctagagtgcagtggcaaaatcttgactcacttcaacctctgcctcctgggttcaagtggttctcgtgcctcagtctcccaaatagctgggattaaaggcatgtaccaccatgcccggctaatttttatacttttagtagagatgggattttgccatgttggccaggctggtctagaactcctgacctcacgtgagctgcccacctcagcctcccaaagtgctgggattacaggcatgagccacaatgcctggcccccttaaatattttctaaatgaataacccaaattggtacttaattactttggatggaactcagaacctcagaagacacaaaaaaattcaagacacagtctctactctggagtttataattagggaatcaattatttagtattgttattatattacatccttatttactgaaattatcgagattaacccggttggtaaatttgatactttgggaaaaacctcactttcacacagttgactactgcctctccaatcagactataagcacctttcattttcatgtttttgaatcagggtctcactgtcaccttggctggagtacagtggcgtgatcatagctcactgcagcctccaactcctgggctcaagagattctcccacctcaacctcccaagtagctacaactaaagacacaccctgctacacccagccaagttgtttcttttttttccttcttttttttttttttggagacagggtctcactctgccacccaggctggagtgcagtggtgaaatcccagctcactgcagcctccgcttcctgggctcaagcgattctccagcctcagcctccggagtagctgggactacaggtgcgagccaccaatgcctggctaatttgtgtagtttttggtagaactgttctctgatttcaaaaaatttagaatctttcagaacagaaaaataatgttcacagattatatgatgaaggtaggcaaactgctttaagaatacagataaaatatccactccaagaacttcagatgcagaggaattgctagtaacacttctagcaatatggcacatagcactgacaaagatgctaacctttcaaccctttttcggacacagaaaggctggatatatatttaaaaaaaatcacaaaataacttttggataaatagctaaattgaaaccaagcatagaaactccacagttgccaaaaattaagaaaacacaaacttgaaagcagctaggaaagaaggaaaacagagtagtttatacctctgaatggtttcaagctagagtatcaaagaccagaaaggagctgaggcagcatatcctgtaagcaaagagacctggagattaactacctgcctaaagaagtctaactacctgcctaaagaagtctagaacatctcctctagctttagcagtctcctatgaaaaactgaaacctccagtccaggacacacatgggtacctagtccaaattgatactacctagatgatttacagaccccaaactcagaatctggcattaaaaactagcctgaaaccagtgaaacccatgaagtccccagacagacaaatgcaaaaacacccaggtgtttctgaggggagatgaaaatgctgtatatactgatcagcaaaatctagacttcaggaaactctttaaagtctacaggacaaacgaatgtgtttcttaacaagtaaattgcaaagaaaataaaacagaaggaaaggtaaactatagatcaagagagactcaagaggtgtatcaagaaaatgctaacatgtggaacttacctgcatcctgatccaaacaagcaaactataaaaatatacacatttgagtccaggagtggtggctcatggctgtaatcccagcactttgggaggctgaggcaggtggatcacaaggtcaggagttcaagacaaacttggccagcatggtgaaaccccatctctaataaaaatacaaaaattggccaggcatggtggtgtgtgcctgtagtcccagctaccaggaggctaaggcaggagaattgcttgaacctgggaggcggaggttgtagtgagccgagattgcgccactgcactccaacctgggcgacagagcgagactccgtctcaaaaaaaaaaaaaacatgtttgaaacaactgaaaatttgaacagtgactgtacatttaagaacattaaggaattactgttcattttcctcaggtgttataatagtgtggtagttactaaaatatttctagatgaaattacctggccaggtgtggtggctcacgcctgtaatcccagcaccttaggaggcctaggcaggcggatcacctgaggttgggagtttgagaccagcctgactaacatagaaaaaccccatctctactaaaaatacaaaattagccgggcgtggtggcacatgcctgtaatcgcagctacccggggggctgaggcagaattgcttgaacccaggaggtggaggctgcggtgagctgagattgcaccattgcactccagcctgggcaacaacagtgaaactccatctcaaaaaacacaaaaaacaacaacaaagaaatcatctgatgtctagatttgcttccaaatatcacatgaaaggggaaagtgaatgggagaacagattcagtaacaagactggccagaatcgataattgttaaagctaggtgatagacataggaattcattattctattctatttctgtatgtatttaactttttaaaaaaggaagtcttgtaaatgtatcctttacctctaacataaaagaatatgtttcatttaacaaacatgagttatcgtcacttacatgattcatttattattatgctctgatctcaaaactcatctgaaggctggcacagtggctcacacctgtaatcccagcaatttggcaagccgagacaagaggattgcttgagaccaggagtttgagaccagccggggcaatgtagcaagacccccaactccacaaaaaataaaaaattagccagacgtggtagtacatatctgtagtctgaactacttgggtggctgaggtggaaggatcacttgagccctgaaggtcaaggctgcagtgagtcatgattataccactggactccagcctggacaacacagcaaaatcctgcctcaaaacaaataattttaaaaagtaaaaaactcatctgatgttgggcgtggtgggtcacacctgtaatcccagcactctgggaggccaaggtgggaggactgcttgagcccaggagtttaaggccagcctggacaacatagggagacccccatcactacaaaaaaaaaaaaaattggccaagcatggtggcgtgtgccccaggtacttgggaggctgaggtgggaggtttgcctgagcctgggaggttgaggccgcagtgagccataattgctccactacaccagagcctgggagacaaagtgagatcctgtttctggggaaaaaaaaatcatctgaaatgtactctgaaaaacattatattagaatattgatattccttttctttgtactttataccttacatttaatgtcctttatctgttgcttcattaaagtgtcatttcagataatattcaaataaaagggcaaccctttactaaaacttaaatatgctgtccatttatgatgatgatgtcactaggtcaatcatccatgaaacaagaaattaagagttttcccccccaatggttaaaagaatgaacttatgtgtatttacccagatgctccaactctatacctcactttataggtcaatggcataattttcaagatagtatgattttgttagtggtaggagatgttaccacagcacaaatggaagttcaaaacaaaaatctagttagatgtaaggcctagtcagtgataaccagtcatacataacacaatatataccagcaatctctatatttgggataagtctctcagcttctcttcttgaagtttcactaccaatatgtggtgaaaatcggaagtgtttccatgagacaaaaggatagggcagtatagctataagaaaacactttctgccgggcgcggtggctcacgcctgtaatcccagcactctgggaagccgaggtgggtggatcatgaggtcaggagatcgagaccatcctggccaacatggtgaaaccccgtctctactaaaaatacaaaaattagctgggcgtggtgttgtgtgcctgtaatcctagctactcagcagactgaggcaggagaaacacttgaactcggaaggcagaggttgcggtgagccgagatcgcatcactgtattccagcctggcgacagagcaagactccattgaaaaaaaaaaaaaagaaaaagaaaaaagaaaacacttcctgtctctataagaaaactcattctgtattctagataaccaactgtaaaacacttgtttcctctgatttcagcatttatgtttttaaaaacattagaaaatgcagggaatttcaaaaataattgctgatttttaccatccatctacagaggaaaatcactgtcaacataatggcacacttctttccagttctccttttcttattgatttgcaagagttttgaatatgcttaataaactttaatcctctattatataaagatatattttttcccactacacatttttaaaatttttaacggttctaagaactgttctggggattctgattaagttcacactgaatatatagattctgggaaaagttacatctttgaaaccccaaatcttccaatctaggaacaaaatattggctcttctacatttattgaagacttttgggtgtctttttggtctcactccttgaggtgtttttttattattattattattttctttttttgagatggagtctcgctctgtcacccaggctggagtacagtggcccaatctcggctcactgcaagctctgcttcccgggttcaagccattctcctgcctcagcctcccgagtagctgggactacaagtgcccaccaccacgcccagctaattttttgtattttttagtagagacggggtttcaccgtgttagccaggatggtgtcgctctcctgacctcgtgatccgcccgcctcggcctcccaaagaggtgttttattattttgagtcagatataatccttcctatattgcatatagaaaaattgaatttttaattataaacgtgtaatcagcccctttactgaattatcttactgctatagtttttcagttgactttgctggctttttacttattttaacagtactggttagcacctcaagaatgttgaatagggctgggtgcggtggctcacacctgtaatcccaacactttgggaggctgaggcgggaggatcacgaggtcagaagttcaagaccagactggccaacatagtgaaaccccgtctctactaaaaatacaaaaaatagtcgggtgtgatggcacgcacctgtagtcccagctactcaggaggctgaggcaggaaaataatttgaactcaggaggcggaggttgcagtgagccgagactgcccattacactccagcctaggcaacagagtgagactccatctaaaaaaaaaaaaaaaaaaaaaaggaaaggaaaagaaacgacaaaaaaaaagaatgctgaatatctagtatacagtttcagaaataagtctgaaagtcttcacttaaaaaaaaaatttttcttttcctttttttttttttttttgaccctgggagcctattcaaaagggaacgctacatggtcgcatcttggcgtgagacagcgctattccgtgggtgctataacaggttccagcagtacttgggtgttgatgtcccacccctgatgctgtgcagcgcctgaaacccagcgagctcggaaggtgtccagaagaatttcagtatttgctacagtaacctcatcagcctgccaagacagcagtgcaagcggccaagagggcgagcattcgacttccacctgaagtaaatcagatattgtatataagaaatttgccatacacaatcacagctcaatcaatgtatatttgggaaatatggacctattcatcaaatcagagtggaaaacacacctgaaactagaggaacagcttatgtggtctatgaagacatctttgttgccaagaatgcttgtgatcacctatcgggattcaatttttgtgacagataacttgtggttttgtactataatgccaacagggcatttcagaagatggacacgaagaaggaggaacagctgaagcttctcacggagaaatatggttgtcaagatagatccaccaaaatcaatgttttctacatttttattttgagggcgggcacggtggctcacatctgtaatcccagcactttgagaggccaaagcgggaggatcacctgaggtcaggagttcgagaccagcctggctaacatggtgaaaccccatttctactaaaaatacaaaaaattagccgggcgtggtggcgggtgcctgtaatcccagctactcgggaggctgaggcaggagaatcacttgaacctgggaagcagaggttgcagatgccactgcaatccagcttcggcaagaagagtgaaactccatctcagaaaaaaaaaaagaaaatagagcatatatgtacaaagtaaaaagcaattgcgatcctacccctggagtaaacaccattaaaattttgttgtgttcccctatattcttctttcaatgcaaacacatatacatattttccccacattaaaaaaaaaaaaaaaaaaaaaacacagccaggcatggtggctcacaccattataatcccaacattttgaaaggctgtggcaggaagatcacttgaacccaggagttcaacaccagcctgaacaatgcggcaaaatctcatctctacaaaaaatacaaaaattagctgagcatgcagtacacacctgtaagtcccagctactaggcaggatcacttgagcctaggaggtggaggttgtagtaagtggtgattgcaccactgcattccagcctgggtaacagagcaagaccctgtctcaaaacaaacaaacaaaaaacccacaatggaggctaggcaaggtggctcatacctataataccagcactttaggaagccaaggcaggaagaccgcctaatgccaggaattcaagaccagcctggacaacagagccagaccccgtttctatcaaaaaaacaaaaacaaaacacacacataagatgattctattcacactactttgtaacaaactttttattctccctacttgctctatgttctggcatctctagtatacatagaatactcattctttataaatgcactatgatattccattcctgattagcatatggttgttttcaatttttgccatcataaacaatgctgcttatgaacaaacactgaatatcctctaacaggattttccacacattcaacaagtattcctggaagaaaaattctttaaattgtattgttggttaaagggtatgagtgatttgaatttttaaagcatgacaatctgacaggtgaaggctgatgttattttaaaacttttctttttttttgaggcagggtctcactctgtcgcccaggctggggtgcagcagtgcaatctcagctcattgcaactgccacctcccaggttcaagtgattcttctgccttagcctcccaagtagctgggattacaggtatccgccaccatgcccagctaatttctgtatgtttagtagagacggggtttcactatgttgtccaggctggtgttgaattcctgacctcaagtaatccacccacctcggcctcccaaagtgctgggattacaggcatcaaccactgcgcctggcctattttaaatttttttttttttttttttttgagacagagtctcaccctgtcacccaggatggagtgcagtggcacgatctcagctcactgcaacctccacctcctgggttcaagcagatctcctgcctcagcctttcaagtagctgggattataggcaccagccaccatgcctggctaatttttgtacttttagtagagacggggtttcaccatgttggcaaggctggtctcaaactcctgaactcaggcgatccacccaccctggccttccaaagtgctgggattacaggcatgagccaccacgcccagcctattttaacatttttaaatcaaagtataacatgcatacagaagagcgcacaactcatattttaaatgtgaagcttgataaatttttcacttgtaaccagcatccagataataacaaagtataaccacaatctcagaaggctcccctcatatctgtccctgcatcgtcactactgtccaagaatagcgtctcctaactttcaacaactaaattttgcctgttttgaacttcatataaatgagatcatatattatacatccagtttccaaactgtgcaccaaggtgccctgaggccctgctagatattcttaatttgagagaaacaacattcagcatctgcaatgcgctataccaactactagactggtatactacactgctttcaatgagatctttatgaagctgtgttttcagtggttgctgtgataaaaagagtaatataaaaagtcaataaggaacatcagatgaagctgggtgcggtggctcacgcctgtaatcccaacactctgggaggccgagacaggcagatcacttgaggtcaggagttggagaccagcttggccaacatggtgaaaacccgtctctaccaaaaatataaaaaattagccaggtgtggtggcacgcacctgtaatcccagctactggggaagctgaggcagaactgcttgaacccagaaggcagaggttgcagtgagcagagatcatgccactgcactcctgcctcggaggaagagtgagactccctctcaaaaaacaaaaacaaaaaaaaaacaaacaaaaaaaaccagatgagagtggtggtatccaatctgattccaaggtttgagacgctgtacagtgcccaataaacaaacatcccattagttaatgtggttgtctaagaatgaaagttttttcgttcaatttttgtgcattttaagaaacagatcttaagttgttaggacataaataatatgaagttttttggatctaactacttaataaacagaactgtcaggtatttcttttggcctggggttgccatgaaccaagggttataaagggagaaagtttaggaacctctggtatatattcctgtgactggtttatttcactcattatcatttgcaagattcattcatattatttcaagtagttgttgttcattcattttcattgtgtaatattctactacgtgactatcccactatttattaatattcttctattgatgggtatttggacagtttccacctttgggctattatgaatagcagtgctatgaacattcataagtgtatatatcttgaagtagcattactgggttacagggtatgtttatgttcagttttagtagataatgctgcttttccaaaatggcatatcaacttatattcccattaacaatgtatgagagttttttatttctccatatccttgctaacattttcattgagtcactgtgatgggtgtacagtaaaacagtacttctctgaagacaaaataaggttgagtttctttctaaatgtttggccttttgaatattctcttttgggatgcctattcaaattctcttcaaaaaacaaacaaacaaaaaactgagtatttttctcgctgtgtcgcccagcctggagtgcaatgtcatgatctcagctcgctgcagcctccgtctcctgggttcaagcaattctcctgcctcagactcccaagtagctgggattacaagtgcctgtcaccatgcctggctaattttttttatttttagtggagatggggtttcaccatgttggccaggctggtcttgaactcctgacctcaggtgatcccctgccttggcctctcaaagtgctgggattacaggcgtgagccaccatgttgggccttttctctgctattaatgtacagttctttctttaggtgtacaatgagtcctttgtcagatacaggtgctgcaaatatcttctcccactctgtggcttgactcttcacttgcttaatgatatcttttgatgagatgttcttgatcttaatatagcaccaatttatcacacttcctttatatttaaccactttgagatccaaattaatctttgctgacataaaatttttttctaaaaaacttttttcatatttagatcagcaatttatctggaaatgacttttgtgtgtggtgtgaggtaaagtcaagatactttcttccctgatacagaaattaattaaccaataccattaatttgactttcctttccctatcatagtgctgtctcacttttatcataatacaggtgatagtatatgtgtcagtctgtttctggactgtcgattttgatccattggtctatttgtcaatccatgtgccaataccatattaccttaattgttatagccaggtaacaagttgaattcctccagattttctttcttcatcgtcatgattaccttgcatctggctttatcttgtatttgaatttgtatttcagttgagtatcttttaatgttcattggccattcatatttcctcttctgtaaactggtttttgggacatgaattagttgccttagctgcctttttcaaactgattagtattagatctttctgtattagaaaacatgcccttcatctgtcaaatgctgtcatctgcatagtgtttttttaaagtgttcttacaatttcctttttttttttttttttgagacagtctcatcctgtctgcagtgcagtagcatgatcttggctcactgcaacctccgcatcctgggctcaagcaattctgccaagtaactggcactacaggtgtatgtcgccatgcctagcttattttttattgtttttggttgagacaccattttgccatgttacccaggctagtcttgaactcttaggcttaagcaatctgcctgcctcggcctctcaaagtgctgggattacaggcatgagctaccatgcccagccgtgtgtgcgtgcgtgtgtgtgtgtgtgtgtgtgtgtgtgtgtgtgtgtgtgtgtaagagagagagacagctagtcttgaactcttaggcttaaacaatctgcctgcctcggcctctcaaagtgctgggattacaggcatgagctaccatgcccagccgtgtgtgtgtgtgtgtgtgtgtgtgaaagagagagagacagggtctcactctggaggctgagagtgcagtgtcatgataaccactcactgcagccttgaatctcccaggcccaagcgatcctcctgagtagctgggaccgtaggcatgtgccaccatgtctggctaatttttaatttttttgtagagacagggtctccctatgttgcccaggcaggtctagaactcttaggctcaagccatcctcccaccttggcctcccaaagttctcagattacaagagtaagccactgctccctgctctactttttaatgcattccaacacatcaatttcttttttttccttctgggctttggtttcattcttagaaatgccttcttcatgccaagatggcattacagtgttggcaaggtaagacaagaggtaaagatagattttaaaattatttttacattacctttttccccccctttgagacaagttctcactgtgttgcccaggctagtgtgcagcggcacaatcacagctcactgagcggcctcgacttgccaagcttcaaatgatccttccacctcagcctcccaagcaactgggaccacaggcatgcaccaccacacctgaataaatttttttttttctggtaaagacagtgtctccctatgttgcccaggctggtctcaaactcttgggctcaagcaatcctcctgccttggtctcccaaagtgctgggattacaggcatgagccactgctcctggccacttatttttatagtgtttgacattttcatgatttgtacattaccttaaaaataattttttaggctaggcacagtgactcacacctgtaatcccagcacattacggggctgaggtgggaagactgcttgaggctaaggttcaagaccagcttgggcaacaaagtgagatacggtcggtctctacaaaaaaaaaatttttaaggttttttttgttgttatctcctacagaaaggagaaaattttttttttaattaaccaggtgtggtggcaagcatctgtagtcctagctactcgggacgatgaggcaggaggatcacttggggccaagagtccaaggttgcagtgagatatgattatgccactgcactacagcctgggagacagaaggaggacttgtctcttaaaaaagaaagaaaaacaatttctttaaagaagaaattttggtcatttcccactgcaaaatattgacccaataatttattctgatacttttataattttagtagccaaatttaatttttttttttttttttttttttgagacaaggtctcaccctgtcacccaggctggagtacggtgatgcaatgacagctcactgcaacctcagcctcctgggctcaagcaatcctcctgcctcagcctcctgagtagctgagactacaggcatgcaacaccacacatggctaatttttttctttgttctagagatgggatctcactatgttgcccaggctggtctcgaactcctggactcaagcaaaatcctcccaccatggccccaaagtgctgagattacagacataagccaccatgcccggccatcagtgtatttttttaaattctcagaaaactgaatgttagttcaggctgtatgtagctatacaactgaaatatacagagaaaaagaaaaaattaactccgatcctaaatcagaacctaattagtatggttttcagcatggtatttatttttattttgttttttcttttcagcataatactttaatttttaaaaaaatcattaaggaggccgggcgcagtggctcactcctgtaatcccagcacttcgggaggccgaggcaggcagatcacctgaggtaaggagttcaagaccagcctggccaacatggtaaaaccccatctctactaaaaatacaaaaatcagctggatgtggtggcaggtgcttgtaatcccagctacttgggaggctgaggcgggagaatcacttgaacccaggaggcagaggttgcagtgagccgacattgtgcctatgcactcgagcccaggcaacagaacaagactctgttaaaaaaaaaaaaaaaaaaaaattaagattgtgaaaacaatacatagaacacactgctgaaacacttcacccagacaaagtttaactctacggcacactttgtatttggaaaaaacacaaaatagaccttcagtagttaaaataaaaagatcataaacttcattcatttttttaaagagatggagtctcactacattgccccagccagtcttgaactcctggactcaagagatcctcccggctcagcctcccgaactgttgggattacaggtgtgagctaccacacctggccataaacttcattctttagaataagaacacagccccgtctctatttcctttcactctgtatagagttctagaattttcttttaagagataattgtgttgcccaggctggagtgcagtattcacaggcacgaccgcagctagcaccctataacctccaacttctgggctcaaaccatcttcctgcctcagattcctgagtagctaggatgggactacaggcatatatcactccatctgcctcacaattctttcacttcatcttacctgcttttataccaaaatggttgcacgcccttggagagaaaactttcagaatccaagcattatgatcacatgccacataaagtttcagtcaacaaccgactgcatataaaaaggtggccccataagattataatagagccaaaaagttcctattgcctagagacattgtagttgaattactttatttttaacattaatttatagtcgtctaagtatacactgtttataacatctacagtagtgtacagtgatgtcttaggccttcacattcactcaccactcactcactgacttaccagagcaacttccagtcctaaaagctccattcacggtaagtgccctatacaggtgtaccatttcttatcttttatactgtaccttttccatgtttagatgaagcttgcccaatgcacagccagcgggccacacgtggcccaggtcagctttcagttacacttttttttttctttttgtgaagaatggggtctcgctttattgcccaggcaggtctcgaactcctgagttcaagctatcctcccacctctgtctccctaagagctgggattacaggcatgagccactgcacctagcccccaggacagctttgaatgagacccaacagaaattcgttaactttcttaaaacattatgagattttttttttcctcagcttatcagctatcgttattgtattttatgtgtggcccaagacaatttatcttcttccaatgtggctcagggaagccaaaacattggacacccctggtttagatacacaagcacttaatactgtgttacaactgcctacggtactcagtaaagtaacatgctatatgagtttgtagcctaagaacaataggctatcccacataacctaggtgtgtagtagactataccatctaggcttgtgtaaatacactctctgatgttcccacaagcatgaaatcgcctaacaatgcatttctcagaacatatccccgtcattaagcaacacatgactgtattgtgtagggttctgatttttattaactattcttttacacatttttagtcaccttcccttctcatacacctcagtagacattcccaacttctgtttagacttcctgtataaaagctaccactcctatcacttacccgcagcaaatgaactcacctcctaattcatgacaatcattcttacaaacttacctatattaacgacttgttttgttttgagataggatctccctctgttgcccaggctggagtgcagtggcacaatgacagctcactgcaggctctgacctcctggtctcaagcaatcctctcacctcagcctcccgagtagctgggatgacaggcatgcaccaccatgcctggataactttttctactttttgtagagaaggggtctatgttgcctaggctggtctcgaactcctgtgctcaagcgatccttctgcttcagcttcccaaagtgttggaattatgagtgtgagccctgcgcctttacatctttaattcttttgttctgatcttagaagaagagttctttccccaactccaatataaggataataccttaatttatgcacggtgaaggaggaaagaccaaaaacaggcaagactcatcaactcatgttcctgctcagggactttgctccgtaacttatttcccaccacacttggatactcaacctcattctcttggtttctgccactcagccaacaaatatattctagtgtcttccattcttttttttttttaaaaaaaagaaaaaacatttcatattttaccctttctatgctctcccttccctgcttatacagcagtcaacattcctgcttctttaccttccattcattccataaccccatctcctaatgctttacgattgtgcctttatctgaagctattacaaaaattaacacagtcatactgtagtacaccaaacaagcagaatggggaaatttgattccacaaatactccaattttgtctatgactatgcctactgatggaaatttggactgcaagagagatgtaattatgagtttctccttggctttaaagtgcagaaaattggaaattggaaacagtaagcctcctaaaattttcacaagttgggcagggggtgagtatcttatatttatgtgtgcagttatattgctttaaaaagtttttccagcctgggcaatatatcaagacctcatctatactaaaaattaaaaaaaaaaaaattagctaggcatgggtggcatacacctgtagttccagctactcaggaggctgagatggaaagactgcttaagcccaggggttcaaggttgcggtgagctatgatcacaactgcactccagcctgggcaacagagcaagatcctgtctccacaaaaaaagtttcttatatgtatatgctaatagtgtttaaaaggaagaaaagtcaggtgcggtggcatatgcctgtagtctcagctactcagtaggctgaggcaggaggatagcttgagcccaggagttcaagaccagcttgggcaaaacagcgagaccccatctctattttttttaaattttaataaaaagaataatttcttcttacatctccattaaagattagaatagagtcctgggactgactttcactccacttccatagaagctaataaaaaaattagtgttataatatctttcattaaaataatctactatcttaagatagatatctaagtaaaagagcaaggaactcaggaactaaatatcaggtttgagaccttaattaaattacttaactttctcaccaataaagcaaggttatactgtactctacttcacagtttaattctgaagattaaacaaaataacacataaaagcacaacatagttacaggcacatgtttaacacttccctcatcttagcacagtgccatactcccaataagcatacaactattaagaagtaaaagtgtaccaaaaaggagcaatattaaaactgtgtgaactatgtgaaacagaaattctaacaaaagcaccatctattcatactaataatcttcaaatgaaaagcttcaattagaagtgaaagttactaaaagatattcaagtattttgaacgaattcaactagtaaatacacttggattacattcccaatgatttcctctgagagattacatatgaggtacaagattacacatgatttaataaaatggacagagagcacacacaaagctgcagtttcccaggctgagaaagacaaatctaatttgtccttcctggggaggaatgtatcttaaatgaacaaaatttccttagaatacacaaaagtaaatcaatgtatcaaagggattaggaaaaaagggagctttttctcgaaatccaaaataataatacgcatgacctaaatgaatcttctccaaatatttaggggggaaaccccactttaattgttagaattggtgcaaagcagctggatttagtagaacgcagcccatcaactgctaattctgaaaaaaaaaaaaaaaaaaaaaaaaaaatctaggggtggagaaagcaggcaatcttcccaataaaacaactgccacaaaacactgtacatacgtaagaacataaacatctgttaaaatatcagtttacactgttccagccaacttacagatcaagaggaagtatttaaggtctaaaaaataaattacattctacttttagtcacattttgcatgggtggctactggacactaggagttatcgacgcggattcaagacaaggaagactgaataataaatccagtgttcacattcaaatgtgggggagagaaaagggcaggctctgagtccataaagttctccacactctgaaaacactgcaaaaatagtccacatctaaggacacttacccttgaaactccttggagagtggcttgggagacttgctgttcagatttttgagggggagtgatttaagaatgctgcaagattgcaactttcaaacacaggaacataatctaaagtgtttttttctttcagtaaagatctctccctgtcctcttcaaacagttgatcagcactcccattttcacaaaatccctaattcaagtatagagcccctcctctcccacaaaaaaatcaaagctttaaagaatatgcaaataaaacacacagattatttccaataatccctaactccttcccaattgggaaaagaaaggagaaacgaaggaacacgaagcaaaaacaccaaaacactcggggaaggaaggcggcgagatgagaaagtaggaatgggtggggggaggagcacggaaaaaagtccagctgatgctgacacttaattggaaggagaggatggaaaatatcctgaagatacgggctagaaggaaaggactaggtgggacaggggcgcgatagagtaagtccacgcaaaaggcctacccaagagggccactgtgtagaagggaacaccaacagggagcaagactccccaagattacttcaaggccccaaagcttaagagacagggcatagggagatggggtgcttctccactggcaatgcagacaccgcaccagacgtttcgggaggcaagtctgccggaaggggtgaggggttaactgcgggggttcgcagacgtggaagggggtgcggcccccggggttgctggaggagagcagagaggaggcccacggcgcataccttgtagtaaacatcaaactggatgttctcgggcaaggagcggatgtctcggcgggagcggatgtagttgtccacgacagcggagatggcggtgttatagagagtctctgggatccactctagttccacggccgccatcttccttccctcctcctccgcctcctccgcctcctcctcccgaaggcccccacctccctccgtagcgaacccctctgcggccccggaggattcggaggggcggtggcagccacgcgggcgcacggcagaaggcacggccgccctgcctcctccgggggcaaactgagggacggcggcagcggacgcaggcccgagtaaaaagtgggacagaaaacagcggccagccaggccaaaagcgtcacaatcccggttcgagaggaacccgggttccgtcccagcgctgatctctgcaggggcggggctgcgtgtgcggcgtcatgacgtaagcgcacgccggcgcgccggaggggaggaatgcggcaggcggaaaacttaggaagagctggatgcctcccacggagagcgtcccttccaagcggccccggagtggagtggagtggagtggataggggtagacttttcacacggggacaaattattacaggatatctgcgccccctgttccgagtcactcggggccatcggttacttcagcaggttctctgcatcacggacccttttgaggctcaggtaaaagtttggatcctctccccacaaacgagcaaaattatctgtacattgaaaattatgcattgagaaaattcacattactctagaaacccttagactgcagttcctaacccaagttaagaacccgcggtccaggaactaggggtaacgatagaagagagacttgtttttctttgtataaccatttgcaccgttgtaactttttgaccatgtttctttatccaaatgaaatttccgaaaaaagaaaactcctgccccagaacttcgtaggaaaactagcttgattatggaattacaaataatagtaagagaaaaaaggctaagtggtggccgtgataggacttaatggtatttcaattcccagagttacagtggcggcttcaagggattgttgaataattgggagtacttgtttcagcttctttccttcctcagcctgaacatctgctgtttatgtaacttaatttcctaagtctgcgatttcaagaatttgatgcaacatctttctgttctaggaatttaccatggaaattattggccataattgttggtgacactatcaaactcatagtcactctataacgatgtaagtccagaaaacagccataataataatgtcctgattgatatttagagctaaaagaagtggaaagagttatttcaatttacccttcacctggtacttcagtgttaagtggttaaataattccacaaaaaataaacactcttaatcttcttcagtctatataaattcttactctatactgtgaacctaggaaagctgtggatggcctcaagatcagattgccagtttagcaagtaaaaaactacaaggctgggcgcggtggctcacacctgtaatctcagcacttgggaggccgaggcgggtggatcacgaggtcaggagatcgagaccatcctggctaacacggtgaaaccccgtctttactaaaaatacaaaaaattagcccgtggtggcgggcgcctgtagtcccagctactcgggaggctgaggcaggagaatggcgtgaacccgggaggcggagcttgcagtgagccaggatcgcgccactgcactccagcctgggcaacagagcgagactccgtctcaaaaaaaagaaaaaaaaaattacaagtgcccagtcacatcttaatgtcagataaacaacaaatggttttgaaatgtaagtatgttctgtgcaatagttttgctcatgccttcggagccactcaagtgtatcagttcattcagcaaatccttcatcacttcttagacactggcgcttttgaagatcaggatccctgccccacataaaagaataattattatctctgcaaatattgcaggggacatatttatactaaaaacttatttgtgaccagcctgggcaacatagcaagaccccatctctacaaaaaaaaaatagccacatgtggtggtgtgcacctgtagtcctagctactcaggaggctgaggcaggaggattacttgagcccagaatgttgagtgagccatgatcatgccactgcactccagcctgggtggcagaatgagaccctgtctcagaaaacaacaacaacaaaaaactttgttgttcatctgaaactcacatttaactggacacctgtattttatccagcaatcctacctaaagggatccatgaatcccctaacattgaatgcacatgttcttggacattttggctaaatcaggacccgtattaagctcctgtaaacaggtaaaggtgtgtcagacacacatattgattgctttatggaccttagatgctgagtgtattagtccgtttacacactgctaataaagacatagctgagactgggcaatttataaaagaaagaggtttattgggtttacagttccacatggctgaggaggcctcacaatcatggtggaaggcaaggaggagcaagtcacatcttaatgtggatggcagcaggcaaaaagagacaaccgaaaggagtttctccttataaaaccatcagatctcatgagactaccacaagaacagcgtgggagaaaccacccccatgattcagtgatctcccactgggtccctcccacaacacgtgggaattatcagagtacaattcaagatgagatttgggtggggacacagagcaaaaccatatgactgagttagacattaaaaaatgtatatagtcacaaaggggactctggatggaagggcctcttgatcccttcttcactgctttcagattgaaagttattcagatgtgtatgatggactaggaggtcgtgaccaagagcagataaactgccagaaaggataagtcccctgagaaggacttagtcctggcagtattcatcaccttctaactgaagagcccttgggccctaaatgaccagcagatatacccagatactatgttgaggaccttgggtgaacctctgagacttgctggcttcagatgccagcatggccacagaggggtagagcaccaagtgggcccttggggttcctgattccaggacttgactcctaaatggcatttctgacctgccctggtccagagtagagccttctgccctgacggttgagtctctgcccagacagcattcaccacacactgacttgagaggccgtgggccttaaggaaacatccgtggaagtctggcagtactccctgtggcctgtggtgatggtggttacagagtgaggctagtctccctttgggaaggaaagggaagagtaggaaggactgtgtcttacggtttgagagccagctcagctgcaatacagtataacaccaggtagacttctgagattttttactctagtctctgactcctggactgtacatctggacctacccagggcctgggggaactcgccaccctgaagggaaggacacacgcctggatggctttgccatctgctaattgtagagccccagggccttgagtgaacataagcagtagccagggagtggttacagcaggtcttgggtgagacccaatgctatgctggcttcatctctaacccagtccagtcatagtgggggtggccacagaggtacttctgtcactccactcccagctttatgtggctcagaacagagagagaaattccatttgtttgggagaaagtaaggtaagagaacaagagtctttgcctggtaatccagagaatttctcccagatgctgtccttgaccatcaaggtggtacccctaagagtctgcaagaacttcagagaactacagtgttattgggttcggggtaatccctcccccagctccaggcagctcagcacagagagagagactgtttgtgtttaaagaatgtaagggaagagaacaagagtttctgcctggtaatccagggaattcccttggatcttacccatgaacaccaaggtggtacctctacaagtcagcaagaaccacagcgttactaggcttgaggtgccccctaaagcagatacagcttagatcacagtagtgaagtcctttgaaatacctggaaagccttcccaagaaggacaagtacaaacaagcccagacactggagactgataatatccaactcttcaatgcccagagagtgaagaatatctatagcatcagcaccatccaggaaaacatgacctcaccaaatgaactaaagaaaccaccagagaccagtcctagagaaacagacatatgagacctttcagacagaattcaaaatagccatgttgaagaaactcaaagaaattcaagataatggaaagaaggaattcagaattctatcagataaacttaacaaataaatcgaaataattaaaaagaagcagaaattctggagctgaaaaatgtaattagcatactgaagaaagcatcagaatctttttttgtttgttttttttttttttgaggtaaggccatactctgttactgaggctggagtgcagtggcaggatatcagctcactacagcctcagcctcacaggctcaagcagtcttcctgcctcagtcccctgagaagctgagactacaggtgtgtaccaccatgctcggcttgtattttttgtagagatagagttttgctatgttgcccaggctggtcttgaactcctgggctcaagtgatctatctgcttcagcctctcaaagttctgggattacaggtgtgagccaccacacccagcctcgagtcttttagtagcagaattattcaagcagaagaaagaattagtgagcttgaagacaggctatttgaaaatacatgatcagggagacaaaagaaaaaggaataaaaaataatgaagcatgcctacaggatctagaaaatagcctaaaaagggcaaatctaagagttattgaccttacagaggaggtagaaaaagagattgatgtagaaagtttattcaaagggataataactgagaactcctcaaacttagagaaagataccaatatccaagtccaagaaggttatagaacaccaaacagatttaacccgaagaagactacctcaaagcattcaataatcaaactcccaaagatcaaggataaataaaggtttccctgacaaaagctgaggaatttcaacaccagacctgtccttcaagaaatgctaaagggaatacttcaatgagaaagaaaaagacattaatgagcaataaatcatctgaaggtacaaaatcactggtaataggacataaacagaaaaatagagaacattataacactataaccatggtgtagaaactacttattctaagtagaaagactaaatgatgaaccaatcaaaaataataactgtgacaacttttcaagacatagactatataagatataaatagaaatagcaaaaagttaaaaaacagagatgaagttaagacatagagtttttgttagtttttttttttttgcttgtttgtttatgtaaatagtgttaaattgttatcaggttataataatgggtcataagatagtatttgcaagcctcatgttagcctaaaaccaaaaaacatacaatggatacacaaaaaataaaaggcaggaaactaaataatatcagagaaaatcactttcactagaggaaaacacaggaaggaaacaagaccacagaacaattagaaaacaaataaaatgacaggaataagttcttttttttttttttttgagacagagtttcgctcttgttgtccaggctggagtacagtggcacagtctcagctcactgcaacctttgcctcctgagttcaagcgattctcctgcctcagcctcctgaatagctgggattacagccatgcgccaccaagcccagctaattttgtatttttagtagagacggggtttcaccatgttggccaggccggtctcgaactcctgacctcatgatccacccatctcaacctcccaaagtgctgggattacaggtgtgagccaccgcttctggcaagaataagttcttatcaatggtaatatcaaatgtagatggactaaactcttcaataaaaagacacagagtggccgaatgggtgaaaaaacaagacccattgatatgttgcctataagaaacacactacacctataaagacacacataaactaaaaataaagggttggaaaaagatattccatgccaatggaaaccaaaaaaagagcaggagtagtcaatgggatatcatctcactccagttaaaatggcttctatgcaaaagacagacaataacaaatgttggcaaggatgtagagaaaagggaaccctcatacactgttggtgggaatgtaaattagtacaaccactatggagaatggtttggaggttcctcagaaaactagaactagagctaccatgtgatccagcaatcccattgctgggtatagacccaaaaaaacggaaatcagtatttcaaagagatacctgcactccaatgtttgttgcagcactattcacaatagctaagatttagaagcaacctaagtgttcatcaacaaatgaatggataaagaaaatgtgttacatatacacaatagagtactatttagccttaaaacaaacaagatccaggccaggcgcagtggctcccacctgtaatcccagcactttgggaagccgaggtgggcggatcacaaggtcaagagatcaagaccatcctggccaacatggtgaaaccctgtctctactaaaaatacaaaaattagctgggcatggtggtgcacgcctctagtcccagctatttgggaggctgaggcaggagaatcacttgaacgtgggaggcagcggttgcagtgagctgagattgcgccactgcgctccagcctggtgacagagcaagactccatctcaaaaaaaaaaaaaaagatcctgtcattttcagcaacatggatggaacaggaaatcattagtgttaactgaaataagccaggcacagaagtacaaacattacatgttctcacttatttgtcggatctaaaaatcaaaacaattgaactcatggtcacagagtgtagaaggatagttaccagaggctgggaagggtagtcgggggttgggaaggagatggggatggttaaaggctaccaaaaactagaaagaatgaataaagcctactatttgatagcacaacagggtgactgtagttaataataacaattgtacgtttttaaataaccagaagatcgtaattggattgtttgtaacacaaaggataaatgcttgaggagatgaataccccattctccatgatgtgattgtttcacactgcatgcctgtatcaaaacatctcatgtatcccataaaaatatatatactatgtacccacaaaaattaaaaatttaaatctttttttgggccaggtgcagtggcttatgcctgtaatcctagctacttgggaggctgagacaggagaattgcttgaacctgggaggcagaggttgcagtgagccaagatggtgccactgccatccagcctgggagactccagagtgagactccgtctaaaatgtagatatatttccacatcaagggatgcttatttaaaatgggagaatgatagggaagcaattctaaagaataaccctcatttatagcctctagtcccaaaacagtctcacactacatgtcagttttctttctaagtcatcaatcagatcagatcagagtactctcctgccctaaagctcgcagatattctgaagaagtgcccagacaagattattactgggtgaagtggggaataagtgaaagggtatcaccagagacaggttaactttgaagggaaagcagtaattttggatataatagccaaagagggcattggttaaaaggtgacgtataaaccaaacgtgaaccaagtgcccagagcgttggaactcatagccctaccctccacttccagggagagaagagggactaaaggccaccaatggccaatgacttaatgagtcgtgactgtgtaatgaggcctctataaaaaccagaaggatcgagtgcagggggcttccaagaagttgaagaaaaatacatctacgtgtctaaaaggcagttcaccccaacttcatgaggatggaagtttttacacttgggacccttctggacctcctcaccctatgtatctcttaatctggctgttcattttgtcaacctaaaatagttaagagggtgagaatctagtttatttatgtatttattgagacagggtcttgctgtattgtccaggctggagtgctcaagtaatcctcccactttgacctcccaaagcactggcattacaggtgtgacccacctcacccagccagagtctggtttaaagagagtttattcaagcatagagtttaaggacagcctcctgggaaacacagattccaaaggatggaagtcagtgttttgtgaatgtgaagtttggattgtttatatagacagattggggaagcttaacagaatttcaacatctgtctctccagggtcttattttttgtgtaggctgtagtccagtggtacaatcatagctcactgcagcttctaactgccgggctcaagggatcttcctacctcagcctcctgagtatctgggattacaggtgccaaccactacatccagctctatataaggcttaatgcatagttacaacaatctgattagtcaggtggtctttttctttcaggaaaggtgtatttaatactacacactgaagatgtagcagtcgtggggtcttttgcaccctctgttctgagttaggtacacaacaataaaggaggcagttaatctataacaaagatgagtgattggaaggggaggggctgtagtttcccttagtcatttataaaacaagaacaatgaggaagagaattaatctataatctaagaagcagaacttgcgaacttgccatgtgactcggtctccaggacttaacttcttacgtggcataataaatttagagggtcctgtttttattttcttttacaatatgtaccctttaaaatatcctggcccggcacggtgactcatgcctgtaatcctagcactttgggaggctaaggcaggtggacaacttgaggtcaggagtttgagatcagcctgaccaacatggtgaaaccccatctctactaaaaaaaaatacaaaaattagctgggcatggtggcaggcacctgtaatcccagctactcgggaggctaaggtaggagaatcgcttaaaccagggagttggaagttgcagtgaaccaagatcgcgccactgcactccagcctgggcaacaagagtgagactttgtctcaattaaaaaaaaaaatcctttataataaactggtaaatgtaagtaagcattcccctgagctgtgagccactctagcaaattaatcaaacccaagaagagcgacatgaaaaccctgatttatagccagtccgtcagaagcacaggtaaaacatcctggggcttgcaattggcatttgttggcatcaaaagttgggggcagtcttgtgggactgagccttcaacctgtgggatctaatgctttctccaagtagatactgtctgaattgaactggaggatacccagctggtgtctgctgcagaattgattgattgcttgatgtgtagggggaaaaaatccacatatgctggtgttgcaagcatgttatgagggtacagtaggaaaaactaagtttgtttttctgctcatacataccctgacaaagcccaagcctcgtggaaggctacatgtaaacactctggtcagcagctccagagcacagcccttgagtcatcccagcccagctaccagatgtttaagtgaagaacctgtagacgattccaactgtaagacatttgagtcaccctttattttgtcccactgaacctatagcttgggtcaccccaaaagtggaggcaagaatgttcccacaaagtgctccaaaccatctcaagatggggctgattgggattcacaagaaagaagcacaaaatgccagggtgatcagtccaaagcaattattagtggaacttagatgcagagtgctgcctcatatcctcatgacagagggcaagagaaaaagaatgttctacccgggtatgtctgcagcaaaggggtcaaagcatagagtttacatgagggttttaggaatttgactcagtgctggggctggtttctttctagtaaacctaattacctttatcagggcctggggacattcaaggccacagtttgaattcaagcttgctgggaaaaacatacagctggcagaatcacagagtggtcaagacactctgatttttggtcaggacacagaaagtgggggaaactgggagaccctataccttcagtcttcctagatgagggcccagcatcatggagctgaaacaagcatccctgctgtgctctgtttgaattccttactcacaaaagcataataaaatggtagttcatttatatcacaaatgttgggggtggtttgttatgccaaaatagataactggaacaccccatcccaatcctctaaagttcccaggaactcattgtcttagactccataattttcagggatacatatcactaagcatgcggatacattcatgaaaatgaaaattcaggccgggtgcagtggcttacgcctgtagtcccagcactttgggaggctgaggcgggtggatcattcaaggtcaggagttcaagaccagcttggccaacatggtgagaccctgtctctactaaaaatataaaaatcagccggtcatggtggcgcatgcctgtaatcccagctacttgggaggccgaggggcgagaatcacttgaacctgggaggcagaggttgcaatgagtcgagatcgcaccgctacactccagcctgggtaacaaaatgagaccccatctcaaaaagaaaagaaaagaaaatgataggattcgtagcctatactagacaactttcatagtttacagactatgactctgctacactttaaagagtgaactaggccaggcacagtggctcatgcttgtaatcccagcactttgggaggccgaggcaggcggatcatgaggtcaggagatagagaacatcctggctaacacagtgaaaccccatctctactaaaaaaatacaaaaaaattagccgggcgtggtggcgggcgcctgtagtcccagctacttgggaggctgaggcgggagaatggcatgaactcgggaggcggagcttgcagtgagccaagttcgtgccactgcactctagcctgggtgacagagcgagactccagctcaaaaaaaaaagtgaactgcctagtcacagagtttcaaaatggagacaacgatttttgtcctaaatctgaagtcttcttcggagccctccaagtctaaagtgcatgtattcgttgcctatcaaataaatagggtcttgtcatggcacacctatggcaccacacatcatataagctaaatgactaggtcattttgtaatgacccatgtaacttgaaactaccaaaaatcaaagcaagtctttgtcaacaagttctggtcatccgagaaaacaatgcagataagaaatccagcctaattattttttgtttgcttgtcttgagacaaggtcttgctctgttgcccagactgaagtgtagtggcgccatcacagctcactgcaaacttgacctcctgggctcaagtgatcctcccacctcagcctcctgagtagctggaactacaggcacacgacactagcccagctaaatatatatatttgtaggcacaggattttgtcatgtttcccagattgatctcaaactcctggtctcaagcaatctgccagcctccagaagtcttgggattactggtgtcaaacaccacacctggcctaaatccagcctaattctcatcatccctcatcacccatatctgcagaaaactaaagagttttctgaacatgttcatagttaccatccatcttgtcctggcccctttaaattcaccctgcttgttagacatagatcctatggccaaaattaatccaaactgctacctgctaggctgttcccttgttcttcatctttactgtctccactaacaaaaacacctccctgctgggtgtggtggctgacatctgtaatcccagcattttgggaggctgaggcaggaggatcacttgagcccaagagttagagaccagcctgggcaacatagcaagacacaatctctacaaaaaatttttgtaaaacattacgcaaatgtggtggggcgcatccggctacttcgctgaggctgatgcaggaggattgcttgagcccgggagatcagcgctgcagcgagcagggttcacaccactgcattccagcctgggcgactgagcgagaacctgtctcaaaaaaatcctatccctgctgggcgcggtggcttatgcctgtaatcccagcactttgggaggccgaggcaggcggatcacaaggtcaggagttcgagaccagcctgaccaacacggtgaaacctcatgtctactaaaaatacaaaattagttgggtgtggtggtgtatgcctgtaatcccagctactcgggaggctgaggcaggagaatcgcttgaaccctggaggtggcagaggttgcaattagctgagatcgtgccactgcactccagcctgggtgacacagcaagactctgtctcaaaaaaaaaaaaaatcctatccctgccagctgccgtggcacacacctgaaattgcaccactttgggaggcagaggagagggctattactagagctccagagttcgagaccagcctgggcaacatggtgaaaccccgtctacaaaaaaatacaaaaatgtactgggtgtggtggtgtacttgtagtctcagctacttgggaggctgacgtgggaggatcacctgagcctgggagttcaaagctacagcgagctgtgattgcaccactacactgcagcctgggtgatggaacaagacctcccaaaaaaaaaaaaaaaaaaaaaaaacaggccggtcacggtgactcacgcatgtaatcccagcactttgggagtccaaggagggtggatcacttgaggccagcacgagaccagcctggccaacatggcaaaaccccgactctactaaaaatacaaaaattagccgggtatggttgtgcacccctgtaatcccagctgcttgggaggctgagacaggagaatcgcttgaactcgggagtctgaggttgcagtgaactgagatcgtgccattgcactccagcctaggcgacagaacaagactctatctcacaacaaacaaacaaaaaaaaccatcatccctattttgctctaagaagcaaaacaaggtatagcctgtgattaggccagtccttattttgaagaagcccacctgaggctgaagcaggaggattgcttgagcctgggaggtaagattgtgcacacacaatctgcctacttgacaatctgaagtagaaacccagcatagaaggactgagtagttctggatttgtgctgccaaggctggtttaatatatggaataaaggcttaaggatcatatatggaaagacagatatgtaaccaatgataattcattgtgaaaagtctgtggtagagtttgcacagaatcttatgggagcacagaggaggagataatgacttgttttgggttgtaataatgctgtaacagttccaatataggtcaatgctcaagtatttttagttgcaatgaaactcataggaaaataacaatggaacagatttacttgggcaattataagtgcgttcattttctttctttttttttaacgtgggttcgttttcaccttgacattgcacctagtaaaattttctggaatcttttctaattatcagaatgtataaaatacatagaagtttgtgaatcaaagttgtggttcttggctggctgtggcagctcacacctgtaatctcaacgctttgggaggctgaggtggctggattgctcaagctcaggagtttgagaccagcctgggcaacatggtgaaaccctgtctctatgaaaaattttttaaacattagccaggcatggtggcatgcacctgtggtcccagcttgttcaggaggctgaggggagaatcccttgaacctgggaggcagaggttgctgtgagccaagatcacgccactgcacttcagcctgggtgacacagtgagtccttgtctccaaaaaaaaaaaaaaaaaaaattgtagttctttatttgtaatggtgaaaggttatgactttttcaatgagatagaaaatagcaaagatcatggatcaggaaaaaaatttaaaaggagttcaaaatgcacctggccaacatagtgataccctatctctacaaaagaaaaataaaattagctaggcatggtagtgtacagctgtagttccagctacttggaaggctgaggcaggaggattgcttgggcccaggagttcaaggctgcagtgagccataattgtgccaccgcactccagcctgggtagcagagtgagaccctgtcttaaaaaaaacaaaaaggaaagaaaaaagaaagaaaagaaaaaataggcacaaggaaagctataggcaatataatatataataatgataactcttgagccatctgatagaactaccattatcctaagtgatcccatataccgccaacctcccaccaaacattttatttaaaatgtgcaaatgacacatttttaacttagaatgcaacatatatggtgaggccatctactgagcttaacaaatactgaggaatttgtgtccaactttttatttattaaggttgatgtatctataagatgttcaggtagctatagtcccagctactctggaagctgggcagaggtaggaggatttcttgagctgagttgttttgatccagcctgggaaacatagcaagaccccatatcttaaaataaataaataaataaatatatacacacacacatacatatatattatatatgatacattatatatatgtattatacatcatcatatatgtgtgtgtgcatataatatattatgtattatacataatatatgtataatacatgatatatgtgtgtatacatataatatatgcaattacatattatacataatacataatatataacatgtataatacattataatatatacaaaatatatattatgtatacatatacccacacacatatatatgttcaggaagacatgggaaaaagctttaagactaaggaaataacctgataattgttgataggtaacgataagagagtatagtatatcgaaagagagaaagaatattgctatggtttgaatgtttgtcccctctgaaactcatgttgaaacttaggctgggcacagtggctcatgcctgtaatcccaacactttggaaggccaaggtgagaggatctcttgagcccaggagttcaagatcaccctaggcaacatagtaagaccctgtctctacaaaaaattttaaaaatttgctgaatgtggtggcacaaacctgtagtcccagctacttggaagcctgaggtgagagaatcatttgagcccaagagtttgcagtggcagtgagctgtgatcatgccattgcacgccagcctgaatgatacagtgactgtctcaacggaaaaaaaatgaaaagaaccttaatccatagtgtaacagtgttaggaggtggtgcttttaaaaggtgattgggtcatgaaggctctgacctcatgaatagattaatctattcatgtgttaatgtattaatgaattatcatgggagtgggtgagttatcatgggagtgggtctgttataaaaggccaggttgactctctctcctgagctccctagccacgtgatgccctgtgctgcctcaggactctgcagagggcccccaccagcaagaagaccctcaccagatatagccttcaaccttggacttcccagcctccagagctgtacaaagtaaatttatttttcttataaattaccccatctgagatattaagttgtagcaacagaaaatggactaagacaaatgtgtaattcaagagaaaagaaaaagagatcacattataatctgccccctaagatctcttataatgatttgttataatttatattatagtgtaatatacagtagtcaccccttatctgctatttcactttctgcagtttcagttactcacagtcaactggggtccaaaaatattaaatggaaaattccaaaaataaattcataagttttaaattgcccgtcattctgagtagtgtgaaaaaaatctcacatggtcccactccattctgctctgtcctgcccaggacatgaatcatctttttgtacagtttgtctacattgtatacactcattactgtatatcaaaaaatatgctatatgtagggtttgatgctatctgaggtttcaggcatccactgagagtcgtggaatgtatccgccacagaaaaggagggactgctatatacggatgccttatctcccaaactggtccataagttttttgtgtttttttttttgagatggagcctcgctctgtcccccagggtagagtgcagtggcacagtctcggctcactgcaacctctacctcccaggttcaagcaattcttctgcctcagcctcctgagtagctgggattacaggcgtgtgccaccacacccggcaaatttttgtatttttagtggagatggggttttgccatgttggctaggctggtcttgaactcctgacctcggtgatctgcctgccttggcctcccaaagtgctgggattacaggcaagggccaccatgcccagccctcataagcatcttgaggacagaaacataaatatgtatttcaggtaccaagcatagtgcagatataggatgagtatttaataactggatgaaaaggaaagatccttcctatttttctctaggggggaaagcacattttgcacataggtgtttatgtaggtgtttgctgcatcgcaaaacatttactttctgtaaaacccaaggtagcaaaaacatacactttaaaatattttttcctgctgagtgtggtggtgcacaacaataatcccagccactcaggaagctgaggcaggaggatcacttgagcccaggagttcgaggctctagtgagctgtgattgcacctgtgaatagccactgtactctggcctgggtaacatagcaagacctcatctctaaaaaaaaaagaaaaagaaaaagaattttcttccttttttaaaaaaattgtgctataacataaaatgtaccattttaatctttttttttttttttttgagacagagtcttcctctgtcacccaggctggagtgcagtggtacgatcatggctcactgcaacctccgcctcccaggttcaaacaattcttgtgcctcagcctcctgagtagctgggtctacaggtgtgcgccactgcacctggataatttttgtatttttagtagagatggggtttcatcgtgttggccagactggtctcaaactcctgggctcaagtgattcacctgcctcggtctcccaaagtgctggaattataggtgtgagccaccacatccagcccattttaaccacgtttaaatgtacaattcattgccattaagtatatttacaatgttgtgcaaccatcacgactatctatttctagaaaattttcatcatcccaaacaaaaagcctatacctattaaacaataactcctcattcccctgtcctcacagtcaggccctggtaaccacctttctactgtctgtctctgaatttgcctattttaggtacctaatgtagtggaattatacaatatttgcccttttgtgtctggcttatttcacttagcataatgttttcaagttcatccatgctatagcatgtatcagaattgcattcctttttaaggcttaatattccattgtatgtacataccacatttcatttattcattcatcggtcagtggacatttgggttattttcgtcttttggcaaatgtgaataatgctgcagtgaacatcagtgtacagtatttgtttgtgtccctgtttttaattctttggggaatatatctaggtgtagaattgctggaccatatggtaattctatgtttaactttttgaggaactggcaaactgttttacagcatgtgcatcattttatattcacctagcaacgtacaagggttccagtttctcagcatcttcgccaacacttgttattttccttttttaaaataatagtcattctggctgggaacgatggcttgggcctgtaatcccatcactttgggaggccaaggcgggtggatcacttgaggtcagaagtttcagaccagcctggccaagatggtgaaaccttgtctctactaaaaatacaaaaattagccaagcatgttggcgagcgcctgtaatcccagctgcttgggagattgagacaggagaatctcttgatccctggaggtggaggttgcagtgagccaagatcatgccagctgggcaacagagcgaggctccatctcaaaaaaaaaaaaaaaaaaaaaaaaagctgggtccgtgctcatgcctgtaatcccagcactttgggaagctgaggcgggcggatcacctgaggtcaagagttcaaaaccagcctgcccaacatggcgaaaccccatctctactaaaaatataaaaattagccaggcatgttggtgcatgcctgtaatcccagctactcaggaggctgaggcaggggaatcgctggaacccagcaggcagaggttgcagtgagctaagatcaggccactgcactccagcctgggcaacagagcaagactctttctcaaaaaataaatttaaaaaaagaaaataaaaataaattaaaaatataaataaataaataaaataatagtcattctaatgggtgtgaagtggtattaaaatatttttgtagccaggtgcagtggctcatgcctgtaatctcagcactttggggaggccaatgagagaggatcacttgagctcagaagttcagggcagcagtgagctagaatggcaccattgtgctccagcctgggcgactgggcaacagagactctgtctcttaaaaaaaaaggctaggtggtggctcacgatcacttgaacccaggagttgaagaccagcctgggcaacatagtgagaccctatctctacaaaatttttttaaaaatttaaaaaagtagccagttgtggtagtgcatgcttttgatcccagctacttgggaggctgagataagaggatcgcttgagcctgggaggtcaagactgcacttgtgagtgatgattgcaccacagcacttcagctagggtgacagagcaaaaccctgtctctaattaattaaaatacatttttaaaattttgtcttacaaaatccacagaagggtgagctagcctgataagaaaggcctattaagtttagagttgaagacactaaagttacatcagaaaatgtttaggcaaacatgttaggaaacttaaaaatgttcaactggttttttgatgttttcgcacatcttcaaatagattatgtatgaggatgtttatacagtttgtttatgtggtaagatatcagtttctatgtttgtttgtttttgagacagggtctcactctgttgcccaggctggagcgcagtggcacaatcacagcccactatagcctcaacctccctgggctcaggtgatcctcccacctcagcctcctgaggagctgggaccacaggcgtgcaccaccatgcccgcttaacataaccgttttaattgtgaactgaacttactctgcaacccctcccctgcattgagacaacagctattgtggttctatgtttacttattttaagtgagagggcacagaagagagaaacaggagccttttgtttaaaagtctagcccctgccgggaaatagaaagcgctaatatgcatagacacagccgtagatttgggagcaacttgatgaatagagcttctgcatcccttagaccagccagtttccctggagaggagaaaggaaaaggagggaaagcccaaagtagaaagcataggaatcttattatgtagaaagtaccctgtaccccgtcccctcaccaccccaccactacctccactcatggatcccagagtaggaatcaaaaactaaagatctgtggcatctgagtacataggacctactttcacaggaagatttgagaaaggcagtaggaacccaaagtggaacagctgcctgatatgcccaggctgttaggccttagacaacatctccgggccctgcagcatgatatgggagtcgtacaatgatgctcttgaattatctggtggtaactagcatctgtgaagtgttttgggtaactcaagagttgctcagaaaaacagaatgatttctgtgtgtttaggaactttaggcagcctcccgaactggccactggcagcctgttacagggggtgacaattccaaggtgccctggagaaaggagagagaaatctgcctctcaagaagctctgtgatccagaaggaggaaagcacagcagtgatgggcacagaccatggccaagggcaaaatagacattggccatcttgcagatgctgatcactagcaggatgaaacagctctaagcattttttggtccttagatcacacgactcaaaattaaaattccagggatagaaaggctgattggctctcttggtcacatgtccacctttggccagaggacaggtcaatataattgttcaccaaaactacatcagctagcaaaaggataataacctaagaaaacaatcaggggatgttaccaaaagacaggatcaggaatgtctggcaagcaaaaactacaaatatctgaattcaccacagggacttacagtgtcaaagataaagtagcttgttgggtttttgtttttcttcccaaaaaactatctgcaagtaaagatatgatagtgtttttttgttttgttttgtttttgagacagagtttcactcttgttgcccagcctggagtgcagtggcacgatcttggcaacctctgcttcccgggttcaagcaattctcctgcctcagcatcccaagtagctggaattacaggtgtgcgccaccatgcctggctaattttgtatttttttagtagagacagggttttgccatgttggtcaggctggtcctgaactcctgacctcaggtgatccacctgcctcagcctcccaaagtgctgggattacaggtctgaaccaccgtgcccggccagtattttttttttaatcaaaattttttttttttagacagggtctcactctgtctcccaggctagctcactatagactccaactcctgggctcaagcgatcctccaccttagcctcctgagtagctgggactacagggtgcaatgcacgccaccacgcctggctataaaaaaaaaaccaacttttaaggcataatttacatacaataaaagtgatacattttaagtgtacacattgatgacttttgacagatgtacacatgtatgtaaccaccacccccagtcaagatggacattcccatctcccaagaagttccctggtgatcctgtgcagtcagttgtcacaaatgccccagcccaggcaaccactgatgtgatttctggtactattgattagttttgcctgttgtagaattttgtctaaatgggtaatggtctaatacttttaatattccattttatttcctattagctttttagctgtacctttttaaaattattttttggagactgccctatggctaacaatatgagtccttaacttaccagactctattcagtcaatactgtctctttacaattaacacttcccagtttctatacaagcccccttctacttatctcacactttctgctgcacaatgaaatacctttacaataaataaaaaatttacaaatacatttatctgccttcctgtattttgatgattttatgattattgtcatatcttttatttctacatttattataagctcctcttacagtattttgttttttcttttctttaaagaatcatcgccttttaagtaaatcacaagaaagaacacaatctttttttttttttttgagacagagtctggctctgtgcccaggctagagtgcagtggtgtgattggctcactgcaacatctgcttcccaggttcaagcaattcttctgcctcagcctcccaagtagctgggactacagggccctgccactatacccagctagtttttgtattcttagtagagatgggatttcaccatgttgaccaggctggtcttgaactgttgacctcagataatccacctgcctcagcctcccaaagtgctgggattacaggcgtgagccactgcgccctgccacagaatcttgtatgtttagcaatttttttttcttttttctttctttctttctttttttttttttttcagatggagccttgctctgtcacccaggctggtgtgcaatggcacaatctcgactcactgcaacctccatctccaaggttcaagttattctcctgcctcaacctcctgagtagctggagttcaatggcacaatctcgactcactgcaacctccatctccaaggttcaagttattctcctgcctcaacctcctgagtagctgggattacagacgtgcacaaccatgcccacctaatttttatttttagtagagaccatgttggccaggcttgtctcgaactcctgacttcaggtgatcctcctgcctcggcctcccaaagtgctatgattacaggcgtgagccaccaccactgtgcccagtgttagcaattatttacaacaactgatactcttacctttcttcctatagatctaattatatggaaagatacaatcatttttgaccaaatttttatcttactatgttgtactctactcatctacatttcttccagtagtggcagtaattttcctatatacaaatacatccatatataagcacacagtatatatacaatatatataaaacatatagacaagttaaaaatatggaaggaaagattataaaagcaataaaaacataaaatatggaagaataaagtaaaaaaaaatgcgatggacctgtgtggaaaagctacaggacaatagggggaggtgaaagaggattttaatgaaaggagggacatgctttgttcccggaaagacaatattgtgaaattttgacttctattgagaatagaattgtttctactctcaacaattccactcatttttgtggtcaaaacagcatatagttgtatctttttttggtaaatgctaaatctgacagttgttgccctttaataaaagaaactctttcatatattaataattggtatacccgattttgcttcagccatcatgtttacactttcagccatcatggtttatactttccactcattgtatattcttgctttctttcttttccttggaaagaaaagtcttcggctaaatggatttttttttctttttttaaagagaaagggtcttgctcttgtcgcccatgctagattgctatgccactatcaaagctcacttcaaggccaggcatgatggctcacgcctgtaatcccagcactttgagaggccaaggcaggcggatcgcttgagctcaggagttcaagaccagcctgggcaacatggcaaaaccccatctctacaaaaaaataccaaaaaatttagccaggtgtggtggcatatgcctctagtcccagctactcgggaggcagagatgggaggaacacttgagcccagaaggcaaaggttgcagtgaaccaagattgtgcctttgccctccagccttggtgacagagggagactctgtctcaaggaaaaaaaaaaaaaaagctcactgcagcctggaactcctgacctcaagtgatcctcttgcctcagcctcccaaaatgctgggattagaagtactgtatccccccttttttttttttttttgtcagagtctcgcactgtcgcccaggctggagtgcagtggcgcaatcttggctcactgcaacctccgcctcccaggttcaagtgattctccttgcttcagcctcctgagtagctgggattacaggtgcacgctaccatgcccagccaatttttgtttttgctttgttttgtttttttaagacagagtcttgctctgttgcccaggctggagagcagtggcgtgatctctgctcactgcaacctctgcttcctggattcaagtgattctcctgcctcagcctcttgagtagctgggactacaggcacgtgccaccatgcctggctaatgttttgtatttttagtagagacgtggtttcaccatgttagccaggatggtcttgatctcctgacctcatgatctgcccgccttggcctctcaaagtgctgggattacaggcatgagccactgcgcccggcctaatttttgtatttttagtagagaaagtgtttcatcatgttggccagggtggtctcgaacttctgacctcaggtgatctgcctgccttggcctcccaaagtattgggattacagacatgagccaccacacctggccagaagtactgtatcctgtttccactttcatggtggtgaattttaccttttagaaaacaatagttatttttattttctgattataaaagtaatacatactcatgaacagaaatttggaataaatagcaaactagaaggaaagtgccatgcagagataatcactattaatatctttaatttttcgtattattaaattttttcgaccgcagccgccgccgcccgaccgccgggaggatggagttcagcgggcagcggagctgtctcagtctttgccgccgcgccggcgagcgccgcccgggaggcagcggctggaggagcggacgggccccgcggggcccgagggcaaggagcagccgcctgccttggcctcccaaagtgccgagattgcagcctctgcccggccgccaccccgtctgggaagtgaggagtgtctctgcctggccacccatcgtctgggatgtgaggagcccctctgcctggctgcccagtctggaaagtgaggagcgtctccgcccggccgccatcccatctaggaagtgaggagcgcctcttcccagccgccatcacatctaggaagtgaggagcgtctctgcccgcccgcccatcgtctgagatgtggggagcgcctctgccccgccgccccatctgggatgtgaggagtgcctctgccctgccgagaccccgtctgggaggtgaggagcgtctctgcccggccgccccgtctgagaagtgaggagaccctctgcctggcaaccaccccgtctgagaagtgaggagcccctccgcccggcagctgccccgtctgagaagtgaggagcctctccgcccggcagccaccccatctgggaagtgaggagcgtctccgcccggcagccaccccgtccgggagggaggtggggggggtcagccccccacccggccagccgccccatccgggagggaggtgggggggtcagccccccgcctggccagccgtgccgtccgggagggaggtgggggggtcagccccccgcctggccagccgtgccgtccggaagggaggtgggggggtcagccccctgcccggccagccgccccgtccgggaggtgaggggcgcctctgcccggccgcccctactgggaagtgaggagcccctcagcccggccagccaccccgtcctggagggagatgggggggtcagcccccccacccggccagccgccccgtccgggagggaggtgggggggtcagccccccgcctggccagccaccctgtccgggagggaggtgggggggtcagccctccgcccggccagccgccccgtctgggaggtgaggggcgcctctgcccagccgcccctactgggaagtgaggagcccctctgcccggccagctgccccgtccgggagggaggttggggggtcagccccccgcccggccagccgccctgtccgggagggaggtgggggggtcagccctccgcccggccagccgccccgtctgggaggtgaggggcgcctctgcccagccgcccctactgggaagtgaggagcccctctgcccggccagccgccccgtcctggagggaggtgggggtgtcggccccccgcccggccagccgccccgtccgggagggaggtgggggtgtcggccccccgcccggccagccgccccgtccgggagggaggtgggggtgttggccccccgcccggccagccgccccgtccgggagggaggtggggggggtcagcccccctgcccggccagccgccccgtctgggaggtgaggggcgcctctgcccggccgcccctactgggaagtgaggagcccctctgcccggccaccaccccgtctgggaggtgtgcccaacggctcattgagaacgggccatgatgacaatggtggctttgtggaatagaaaggcgggaaaggtggggaaaggattgagaaattggatggttgccgtgtctgtgtagaaggaggtagacatgggagacttttcattttgttctgcactaagaaaaattcctctgccttgggatcctgttgatctgtgaccttgcccccaaccctgtgctctctgaaacatgtgctgtgtccactcagggttaaatggattaagggcggtgcaagatgtgctttgttaaacagatgcttgaaggcagcatgctcgttaagagtcatcaccaatccctaatctcaagtaatcagggacacaaacactgcggaaggccgcagggtcctctgcctaggaaaaccagagacctttgttcacttgtttatctgctgaccttccctccactattgtcccatgaccctgccaaatccccctctgtgagaaacacccaaaaattatcaataaaaaaacaaattaaaaaaaaaatttttttttcatgaagtaatgtgcaattgctgtaaagatttccaataacattgaggcattatagtggacatcttttatttttgctcatctagtatctattctttcttctggtaacaccacctgatttccctttggggagctatctctcttccaatttccattcatgtgtttcagatgggactgagcccacctctcagctccagagactggccaagagccaggcatggccagggtgatgatgaacctggcaaggctaatgggaatcaattctggaactttagttaaaactactgggaaagagaggttccctttctctactgtgactcacacctgacaaatagaatatggtggaagtgatgctgtgttacttccaaggacatagcttccactcagtaccctctttcttgaatcactcactctgggggaaggcagccaccatattgtgaggccacccaagcagccttgaggagaggaccttgtgaagaacaactagggcatcagccatgtgagtgaaccactttggggtttttcatttgtttgtttgtttgttttgaaacagggtctcactctgtcactcaagctggagtgcagtggcatgatctccactcactgcaacctccacctcccaggctcaggtgatcctctcacctcagccttctgagtagccaggacaggtgcacaccaccacatctggctagtttttgcattttttgtagaaacagggttttgccatgttgcccaggctggtctcaaactcctgggctcaagcaatccacctgcctcagcctcccaaagtgctgagattacaggcatgagccactgtgcctggctggagttagccactttgacagtggatactccagcctcagtcaagccttcagatgacatctttattgcatcctcatgagtgatcctgagccagaactgctcagctaatctgttcctgaccacagaaactttgagagataataaatgtttgttgttgttttaagccactaagttttttgtttgtttgtttgtttgtttttgagatagagtctcaccctatcgcccaggctggagtgcagtggcacgatctcaactcactaaaacttccacctcccggacttaagcaatcctcccaactcagcctcccaagtagctaggactacaggagtgcgccaccatgccgagctaatttttgtatttttagtagagacagagtttcaccatgttggtcaggctgatcttgaactcctgacttcaggtgatctgcctgccttggcctctcaaaatgctgacattacgggcatgagccaccatgctcagccataagccactaagtgtttagataatttgttatgtggcaagagataactaatacaagattagtttaggaatccaaacctaagcctatcagcatgtggcattcccctgtgaactttgctggttcaagaataggtatgttatgaaattgtcctaattagacccagggacagacttataaacagctgggtgaatagctctcttctactacccataaacatgaaaacctatgttcaaagtgtggctggcagccatcattataaataaagccctcattagtgcacttgatgagtcttaagaaagaaagtggctgggtgtggtggctaattcctgtaatctcagcacttgggaaggccatggcaggcagatggcttgaggccaggagtttgaaatcagcctgtgaaacatggggaaaccttgtctccacaaaaaatacaaaaatgagctgggcatagtgccacatgcctgtggtagcagctactcaggaggctgaggtaagaggatcgcttgagcctgggaggtcaaggctgcagcaagccgtgattgcaccactgcactccagcctgggcaacagagcaagaccctgtctccaaaaaaataaaagccaactttagggtgaatataatattgtagatagcaaatcagatggacctaataaattgcgtccttggtgaaattattgagctactgaaataaataaccataaacccctccttaactttaaccttctagttatatgagccaatacagttccttatcatcttagccacaatagccttctttatgttagcatttgctttaatagaaacacttcccagtattatcaaactcttttagtaatgttgttttaggtatatcttatgtaaattgtaaatggctgggatttttttcttttctcaacatgactttgactttgggagaatttactacatgatcatagctcactgaagcctctgactcctaagctcaaaggatccttcccaccttggcttcctgagtagctgggactacaggtgtgcaccaccacacatggctgatccaacgttttgaaatctggatcttttacatagaaattaagttgtgtatccacactttaaaaattagaggatctataatgtgaggccccttaatctcacatcactgagtggtggctggcccctttagatggggtatgtacccgctggttcaccacagtgccccccattctatgttatttttccaaagtggagagaattttagtttatatttatggtctctccttgcactatttttttcttatggtagaatatctgtttccatgactctattacttttattgaagaccaagagagccatatttcaagaaataaaagtaaaaatatccatttccacattacccttctggcccctgtggtcatttgggtttgcattttctgttttaattctttttctcttttacaattggttacctataaattgttaacaattatgttatgggtcactggtttctttcttttttttttttttttttactttttttctttttctttttcttttttttttctttttttgagacaggatgaggctctgtcactcaggctggagtacagtggggtgatcacagctcactgcaacctccacctcctgggcacaggtgatccttctacctcagcctccctagtagctggaacttcaggcacatgtcaccacacccagctaatgtttgtattttttgtagtgacagagtttcgccatgttgcccaggctggtctcaaactcctgggctcaagtgatcctcctgcctccgccttccaaagtgctgggattataggcgtgagccaccacgctctgcccaatatttttaatgaccatcaggaaacagtagctataattttgctcccctataattttacttgctacagaaaatctttagcaagattttctttctcctctgccttataactcacttccacttttgttgtgatttagttcaacattgttattcatctttcttattaagtctcttctaagaatcttttctgacaaattgcactaaacatcaaaaccactatcaacaactatttaatctatacagctgtaaacattgtcagtttctttactcatcactgtttctttttcttttctttttttttttttttttttgagacagagtcttgctcttgtcacccaggctggagtgcaatggtgtggtcttggctcactgcaacctccacctcccgggttcaagcaattctcctgcctcagcctcctgagtagctgggattacaggcactcgccaccatgcccggctaatttttgtatttttagtaaagacagtgttgtgccatgttggccaggctggtctcaaactcctgacctcatgatcttccccactcagcctcccaaagtgctggaattacaggcgagagccaccgcccgcggcctctttttttttttttttttttttttgagacagaatctcgctctgtcaccaggctggagtgcagtggcgggatcttggctcactgcaacctcctcctcccgggttcaagcaattctcctgcctcagcctcctgagtagctggaattacaggcacatttcaccacacccagctaatttttgtatttttagtagagacgaggttcaccatgttggccaggatggtctctatattctgacctcgtgatctgccggccttggcctcccaaagtgctgggattacaggcgtgagccactgcgccccgcctactcatcactgtttcttatatatcacccctgcccttttttgagctttttattgtaattcatctgtcattttgctacagttcttctttcttaagggaaaaaaaatatctgttgatagatggtttgcactccctcaaaacttgtcagttactgggctattcaatttcgcttgagctaggcctcccaccccaaggctgcagcattctgctggccagtttcaccctgagtatgatgagtggccatggaactggctgacaagctaagaccctgccggagcaagaaagcaagggaagtggtggaggcttaagggacttcgctgatgtgatttgactgttgtgctgagtctttctctttttgtccccaattctctctcttcttgtttgttgtagttgcctaaaattagttggatctcagctagccaatctctctggctgcctaggtaaattgccatttcaaagagagtcaagcatactagtgtaaaattgtgatccttttcccctaaaacaggaaacactgctccactgtctttttgtatctattgctgcatatgagaaaacatgaaaagttatgagtttctttttatctttggaatatggaaaagtcaccagactcacttggaattatcttcaattcctctctttctcacaccccaccaccttctacctatcagtaaatcttgttagttctaccttcaagatggagttcaggcatggtggctcacacctgtaatacctaactttgggatgccaaggtgggaggatcacctgagcccaggattttgagaccagcctgggcaacatggtgagacccccatcttatatagctgaaagaacactcaaggggccataggcaggtgaaagatggtttcattcagcagctctcttacactgtctgtctctgtctcagctacctgttctggctctgtgactcctgccactcccacacacagctgcaaagccagctgtctctacagggtcagaagcttaacactttctctctctgggcaagagcatgcctgtacaacatcagcagggcagttataccttttacagacaatagtggctccaagccaagtgatgagccttcccatgttatgcctatgtagctgtgattatataacaagcaaagttatgcacctgcactccaaacttgctgagtcatgtgggatgtttaccttggcccatgcctgcctcgctgcattgcagccatgttccttacacaggaggatcccttgagcccgggagtttgaggtcagcccagggaacatagcaacagcctgtctctaaaaaaaaaaaaaaaaaaaaagtaaaatatttttaaaatttaggaagctgccagggatggctcctccaaaataaggagtaaaccaagcaggaggaaaaatatgacacaaaatgaagggtacaaccaaaagagtggtataaagtaaaccactaggatggttgtaaagggagataccaatgagacagtggtataggcctagagaggaaccaatacagattggagcaggccagaagggtctggaagagatttccaaagaaagattcaattaatagattatgattgctagaaaaacacttgttagatcctggtgtctgggtccagccatgctgaagtctgaggggagtgggtggatgagcagaaagaacacttgatgggctgtaggcaggtgaatatggttttatttagcagcagctctcttacacggtttactcaaactagctcttttacattgtccaccctgtctcaactgcttagtctggtggctcccacatacacctgtgcagcaggctttcccttgccttcagggtcagcagcttaactctttttctctctgggcatgagcaagccaagctgtgtcctggctccctcctgtccatctgtaaaatggacagctttggctctctctgtctctctttctctgggtgccagtgcatcccccatgtcaagccatgttgagccgagccaagcccccaggtcccccgtacagcattaacagggcagacaatagtggctcagagccaagtatgaacttaacacaaacaagttatataacaagtgaaggtgtgcgcctgcgcaccaaactcactgagttacgcaggccttggatatccacctcggcctgttccttgaccaaagcacatccatatgtaccttacactccaccccctaggccaaacgagacatatgccttggacacacaggtttgatccacaggtttggcatacaggcctgacatataaactttgggcatgcaggcccaatacatacacaggcttgacacataagcctgacacacaagccttgggcacacaagcccgatacatacataagcttctgggtacgcaggccccttgcatacataagctatgataaactgcccagctactggcgcagattaccttaggtgtcacctccttggtgattaccattcacactgccttgagtttagcttattaaccactttgcccatacctgctttcaaaccatatgatgtcagtactagcctggactgcaccagcagtccaggcagcagtagcaccccagctggacccacttgtacacgataccctattaggaatgggggggtgtgcttcctaatggtgaaggcttaggtctaggggtgcctcaggcctcatggcctcatcttgcattaggactactactcaggaggctgaggcaggagaattgcttgaacccaggtggcggaggtcgcagggagctgagatcgtgccctgcactccagcctgggcgacagagcaagactccatctcaaaaaaaaaaaaaaaaaagaaaaagaaaaaagaaaaagtccattgttgccctcccatgaaggcaaactgttcctggctctctggacaagaagtcccagttccgttgtcaagcggtcggcaagtccgtgacagacaatacagctgccaagccgtgcaaaacatccacccccagaatgtcttcaggtatgtgagacacatacacagtgcataagtggagagccaagcagcggatgccaagatgcaaagacacaggttttactttcactgaccaactttcatagctgttcatgcggctctgcccggaaacttatccgggttcagagaccagtggattgccaaatccacatgtggctctggttttccagtgccccgcaagccggcaccttggccagttctcttatcaagcagaaaaggctttacacttccgccaactgcagcaggtactctttgaactggaatgctcgagtaggactaggttgcgcagcaatgtccttctcccgaatgacttgcactaagtctgtacacaactggcgacattagttgcttaactccctcaattcagcggggacacaggcaccataggaaatgtgttccaccacgatggggggtctctgggcctcctcttggggcccaacagctgttcatgctctattttctgacggactaccgggcaagcctgcaacggaggttcctcctccctgcgctgcatcctgcagggattgggcattcatttccctcagcatagtcgcaaatgcccatctgactctgctggcaaaggtatgttcctttcaatgctgtgcatttccaggtgattcagcgccttctccacactcataggggatctgtacactgcctcccatgtttccactggggctcatccaagcagcaccactgcgaccgggtaccacagctcatgctgcggccacgtagccgtcccgggagccctcaggggctgaagacccactcacctccttccatcctcgtcgccagttgttagatcctggggtctgggtccagcccatgctgaagtctaagggcagtaggtggatgagcagaaagaacactgggtggccggccataggcaggtgaatttggttctatttagcagcagctgtcttacacagcttactcaaactagctcttttagactgtccaccctgtcttggctgcttagtccggcgactcccacacacacctgtgtggccagctctcccttgcctttagggtcagcagcttaactctttttctctctggacacgagcaagctgaactgcgtcatggctccctcctatcagtctgcaagacagacagctttggctctctctctctttgggcgtcaacacacgctccatgtcaagccatattgagccgagcccagagcccctgtatagcgttagcagggcaattatacctttttcagacaatagtggctcagagccaagtatgaacttacaccaaaaggttatataacaagtggagatgtgcgcttgtgcgccaaactcactgagttatgcaggcctggatatccacctgggcctatcgaccaaagcatatccatataccttacaccactgttttgaatgtatcaagagcagatttatataactggagtaagtttggggttaaattaataataaataatttaaaagccagataaatgaacaaacaataaccccaggaaagacaaaaatgtaaaagggaaagtaatcatactataatattagcatggataaaaatagcatttttcggctgggtgtggtggctcatgcctataatcccaacgctttaggaggccgaggccagtggatcacctgaggtcaagagttcgagactagcctggccaacatggtgaaaccccatctctagtaaaaaaaaaaaaaatacataaattagctgtggtggcaggtgcctgtaatcccagatactcaggaggctgaggcaggagaatcgcttgaaccctggaggtggaggttgcagtgagccgagatcatgccattgcactccagcctgggtgacaagagcaaaattccgtctaaaaaaaaaaaacagcattttttacttctccttcctgccactttgtgaagaagttgctttgcttctcctttgccttccaccatgattaagctaggagaggatatgcctgcacaacatggcagattatcaatgggggacctgagaaactgaagttctatacacatcaggggctgagaggatgctccaggtgatggtgaagtaagctccagcaggacaagtggagcatggagtataccttcaattagaaagccaaaacaatgtgaactgttgaaaactgctgtcactgattctctccaagctgagggaatacgcaaggtccctgcctcccacgaaaagccgctcttaatattcatccagcaggattgtatggaaatcaagaaatccaaaagggctgtgaaatattgatgttctgttcagtttcaagacctctgaaatgcaaagtgatatgtacactaaacacacaagaaaatgcaaatacctttataacacttttctcatagttctattttcatccctattggaagcaagtcgttaacattcattttatcgtaaatataatggcaatgaattttaatgtgcacaaattaaaatattttataaattttaaaaatagcattttacattattcaacttatggaactatttgactctagattatatgattgtataacctgaaaaaactaattataaaatattttatatcattcaatttagggtattagataaaaaaattaactcatagtgactaagctggttaattattgcccttaaatggatattaaaagcgaatttttctctttgataaagtaactagcaaatgattaaatgttgtgaaagtgtttcctggtgtatggattcactgaattcctttgacccacttaaacagaacatgtgacattcatgaaatagtaacttaatagctttaaaacagctgttctgtagctccaaattaatttagcttttctctctcaacatgtctactttatgagaaaaaagcgtgagaaatgagttgttcttttgctttcaggccctgtcctaccatgagctgaagaggcagcaacatacgtgtttggagtttagtagggactgagaagcggggaaaagaactgcctaaccaaaggtattgtttccacctgacttccaagatgtcagaaaattctccctagtagatactcttttatacatggacattagctattgttgttaaaatgaaaacaggttaaacctattacgttatcatcacctatcaataatttagactatcagcttatcagatttattagtcttgtagtgaaatcctgttgttaaacagcacagaaacaggagagaagaaagaattgtctaagtctgcactgtccaacagaaatataatatgagccatataagttgaaattttctagcaattagcaagtaaaaagaaacaggtgaatttttttctttttttcacttcctcctcttccaaggtgaaattatttttaataacatatttttgttaacccaatatatctaaaacattttcaaacataaatcaatataaaattattaaagagatattttgcattctttttctgtactgtctttgaaatccagtgtatgttttacacttacagcacatcttaatttgaactagacacatttgaagttcttaatagtcacatgtggctaccatattggacaagcaggtctaagtcagtggttcccaaaatgtggtccctggagcagcaggataagcatcaccctaaaacttgttagaaatacaaattctcaggctccaccccagacctactgaatcagaaactctgatagttgggctcagcaacctgtggtttaacaagcctttcaggtgattctgataacatgttaaatgtcacaatcagcagtctaaattatggggaactggtttttctttgctaagtacatttaacagggttcaaaattcaaaaagtacaaaaacatacacagtgaaaatcttcctttcctgccaggcacaaaccatctatctccctttcctagaggcaaccaaaattttatgttggtaggcagctgtcatgctggacccctattgacttcaacagcaatggcaccatgtttgagaggctgaagacgagatgcagagccagtgaatgagacacagggtttgtttaattaatttatttactttttgagacagggtctcgctctgtcacccaggctggaatacagtggtgtaatcatgactcactgcagtctcaaccacctggacacaagcaatcctcctgcctcagactcctgagtagctgggactacaggcattagttctggctaattaaaaaaaaaaaaattatagagatgggtcctcacaatgtttcccaggctgagacatagggtttattgaggagacttacatacagggcaatccagtggtggcaggctggacaggagaactgcatttgcttacaaaaaacatactggctgggcgcggtggctcacatctgtactcctagcactttgggaggccaaggcaggtggatcacttgaggtcaggagttcgaaaccagcttggccatcatggtgaaaccctgtctctattaaaaattcaaaaaattagctgggcacggtggtgcgtgcctgtaatcccagctacttgggaggctgaagcaggagaattgcttgaacctgggaggcggaggtttcagtgagctgagatcgtgccactgcactccagcctgggcaacagagcaagactccatctcaaaaaaaaaaaaaaaagtatactggttatatagtgttttcacttagcattctcaccctagcaacctccacctggcaaccttgatttaacccaaaacaaagggccttgatcccctgtatggcctgcattccatgggatgagatggggattcctatgttcctcataggtaaggaatgaatctcctgattggcaactcccaggttccttttttttttttttttttaagaaacatgtttattttcggtcaaccttatttccatgtggcttatgagcctgtaagacaacttggtggttgttcctacccattcaagtggcctgagcagtgggagctgcagaccagacttccatggcaggctgagctctccaatcttcagtaaggaattgctgaataggcacagagggcacctgccacattcagatcagtctgcaccctcaggcagaggagcagtgaactcaggagctggagcagtccatttaccctgaaattcctccttggtcacagctttttttcagcaacagcttgctcttccttttcatctttttttatcttattatatatatatatttttttgagacagagtctcactctgttgcccaagctgcagtgcagtggtgctgtctcagctcactgcaacctccaccttctgggttcaagtgattcgcctgcctcagtgtcccaagtagctgggactacaggcacgtgccaccatgccagctaatttttgtatttttagtaaagaccgggtttcaccatgttggccaggctggtcttgaactcctgacctcagtgattcacccaccttggtctcccaaagtgatgggattacaggcgtgaatcaccacacctggccttccttttcaacctctttaggatctctataaaagtagagatcaggcctgagctcccatgagtgttcacaggagatggtgccatgcatgcacagaagttcccaaaccagcatccaccatatcaaacccgtaagtaagctcctttgttgttgcatgggatggcaatgtccccatagcgcaaaggagaatctgtgttgcacagagcgatggtagataagattaacataagttgcctctgtgacaggccggtggtcgttgttggattgttggaatcaataaccaccagaagctgtggctcccagaaggtttcctggatctggttagtgaaggttccaggagtgaaccgaccagcaattgaactcccagagattctttagctcagagttccgaacacgcattcttcttttttttgagatggagactggagtgcagttcactacaatctccacctcctcggttcaagcgattctgctgcctcagcctcctgaatagctgggattacagacacgcaccaaaatgcctggctaatttttatttatttatttatttttatttatttatttttttgagacgctgtctcgttctgttgccaggctagagtgcagtggtgtggtcttggctcactgcaacctctgcctcccaggttcaagcgattctcctgcctcagcttcccaagtagctgggactacaggtgtgcaccaccatgctcggctaatttttgtatttttagtagagacagggtttcaccatgttggccaggatggtctcgatctcttgacctcgtgatctgcccaccttggcctcccaaagtgctgggattacaggcatgagccaccgctcctggtctaatttttatatttttagtagagatggggtttcaccatgttgggcaggctggtctcgaactcctgacctcaggtgatccacccgccttggcatcccaaagtgctgggattacaggcatgagccactgccctgggccgtccgaacacacattcttcttaggccatagggtcattctccgggtatgcttaaattatttctgttaggcacatctgccatacagcagcctccaagatgacctccagtgatccctgcctcctggtgtttacccttttgtagtcccctcatattgtaccagatttgctctgtgtgactagtagaaaattgcaacagtaatggtatgtcccttcaaaggctagtgtatagaaagactttgtggcttttgccttgctgtctcttggatcagtcactagctgctatggtgtgaagacattcaagcagccctatggagaggtacttgtagtgaggaactgaggccttcagccaagagccaacaagaaactgaggcctcctgctaacagtcatcatgtgagtgagccatcctgaaggtggattctctagccccagtcaagtcttaagagattgaagccccagtcaatatctaaattgtacctcatgacaaacaaaccctaagtcagaaccaccctgctaagccccttcccaatttatgacccacagatactatgaaataagaaacgtttgttgttttaagccatcaaattttgtggtaatttgctatgcagtaacagataactaatagaccacatctaggagaatttggaaagagtcacttgaagatctatacaaatagtaaaactgagcctgataaatctaaattgctgccctaagattacgttattcatgctagccattgtaaaaaaaaatcattactaaagttttaaatattataatgtgtccttcttgttaaacacacatacacacgcagaatacagaattatgtgaataggcctggtgcggtgactcacgcttgtaatcccagcactttgggaggctgaggagggtggatctcctgagatcaggagtttgagatcagcctgaccaacacggtgaaaccccatctctactaaaaatacaaaaattagctgggtatggtggcaggtgcctgtagtcctagctacttgggtagctgaggcacaagaatcgcttgaacccaggaggcggaggttgtagtgagccaagatcatgccactccagtccagcataggtgacagggtaaaactatgtcttaataataataataattatacaaataggacaactccttcaatcttctctgaaactgccttgattccatccatttctgcacaataattcttcagctttttcttccttttcatgaaatacatattttcattttccccaaaactacccagtctgtttcttttgcttaaaataataataataattttttattttattttagagatgaggtcttgttatgttgcccaggctggcctcaaactccttgggctaaagtgatcctcctgcctcagcctcccaagtagctgggactataggcatgctccaccacgctcagattatagtcagaagaatcttaacagtattataatggatgtaccacaatttaatccatctcctcctaatggacacaacttatttaatttttaatattattaataatattgccaccttctttacatctttgtgcacctatgtgttattgttaagataaactcctagagatgaaattactgagagggctggatgcagtggctcatgcctgtaatcccagcactttgggaggctgaggcaggtggggacatcactgtggaatgtcagaaatgaaagtcagtaaattttgttttgtaagttcaaaagcagtttctgtctcataaagcaaaaaatattaagaaagaagataaaatcagtcagcagagatgaccagataggtagagactgagaatgtcacaacctctgctcactcttacaaccaccctggtagcatttttaccccccttcccaggagtattaactccaaaaggaagaaagatcaagtagaaagaaacgtaaactaaggtattttaaacatgaattgagatataattgaatttgatttagtttgccttagattaataagattgttttctgcttcaggcaggatggggactcaaggtcataaattaagattgaactgtaggaaagttctatttggctgggcatggtggctcatgtctgtaatcctagcactttgggaggccaagaaaggaggatcatttgaggccagaagttcaagaccagcctgggcaatatagtgagacctctgtctctcccaaaaaatacaaaaattagccagacatggtggcacataccagtggtcccccagctgcttggcacgctgatgtgggaggatcacttgagcccaggaggttaaggatgcagtgaactttgatcatgccactgtacaacctgggtgacagaaagagaccctcatttcaaaaaaccaaattaattaacaaaattaaatataacttttcttttctttttttttttttttttgagacaggtcttgctgtgtcacccagcctgtaatgcagtggcgccagctcagctcactgtgaccttgaccttctgggctcaagtgatcctcccacctcagcctcccaagcagctgggaccacaggcccacaccacaacacctcactaatttttgaatttttttgtagagatggggtctctcactatgttgcccaggctggtcttgaactcctgggctcaagtgatcctctcttggcctcccaaagtgctgagattacaggtgtgagccactgctcctgattaaaaagttctattttccatatacctgcacttggaggacactgtgggtgagcatctgtgcacgaccggttcctcacttgccttgcgctagtcccagccctgctcttcatttgctgctttcagagggtatctttcaacattttcctgaacttgggccttctctgagggagatccagcagtttctgaaatcactaactgctagtttacaaaatcctttcgggtcccagacatcctccctatttcttaagaatatttttggccgggcacagtagttcacgcctgtaattccagcactttgggaggctgaggtgggtggatcacctgaggtcaggagtttgagaccagcctggccaacatggtgaaaccctgtctctactaaaaatacaaaaatcagtcagtgtggtggcacgtgccagtaatcccagctactcgggaggctggggcaggataatcgcttgaacctggaaggcggaggttgcaatgagccgagactgtgccactgcactccagtctgggtgacagagtgagcctccatctaaaaaaaggaaaaagaaaaatgttcaggactattatagctgagaaaagttttcttcatgtgtcctttagacttctatgttcacagcctttcttcataacaggcccctcccttttctccctcgcatcctaataaacctctattctaccctctgccaaatttgtattaaaagtcgcacatgagcccagacgacatctgattctctgcagctaacagagggctggcaacagaaatctctcttacatcctggcaatatgtaatatactacctttctcatctagtgatgagagtccttacgggtctagtttcttcctaaaggatgcaccctctctgaaactagacatcaaccttataactttgaatcattctctaatttggcaaaagcagatcttgcaaaataattttatacgttctattttgaaaatgccacctagtggacagagctagtaaggttttcatgataacaaccagtcatgggataatcacgagagtgagcccagggatttagcaaaccctccagctgggtccacttcagcacacaaaccagccaaatggcctgtgatgacttttctttttctttctttctttctttctttctttctttctttctttctttctttctttctttctttctttctttctttttctttctttctttttttttttttgaaatggagttttgctcttgttgcccaggctggagtgcaatggcacgatctcggctcactgcaacctctgcctcctgggttcaagtgattctcctgcttcagcctccagagtagctgggattacaggcatgcaccaccacgcccggctaatcttgtatttttagtatagacagggtttctccatgttggtcaggctggtctcgaactcccgacctcaggcgatccacctgccttggcctcccaaagtgctgggattacaggcatgagccaccgtgtcctgccctgtgaagacttttatcctgtcttttctgcttccctccaaattaatcatgacataataattcaaaagaaaatattgggggcaggcacggtggctcacacctgtaatcccagcactttgggaggctgaggtgggcggatcacttgaggtcaggagttcaagaccaatctggccaacatggtgaaaccccatctccactaaaaatacaaaaattagccgagcatgatggttcatgcctgtaatttcagctactcaggaggctgaggcaggaggatcacttgaaccagggaggaggagattgcagtgagccaagattgcgccactgcactccagcctgggcaacagagcaagactctgtctgaaaaaaaaatacaaaagaattaacatcaagaagaaaatgttggttgttccaattcatgttgttatgacatccaagttgctagctattgtaatggcaaaatatttggggaaagtatatggaacaaaggttcatgtgctgggcaatgatgggaagttagtaattagtatgtcccctctccaactgcatagaatagtttacactcagcaggaaaatcgctaaactaaaattccaaacataatatgagaattcaataggtactttattgtttgaaaaaaaacatataaatcatgactgtttctccccacccctaagagtagtaatttaaaactctggaaatattttaaacaaagataggaggcattcctttctttcaaatatggagtactttcagataagatccctgaaatcttcttttgagaaatgtcagggcaaaactgagatccagtttctgagtttagacagaaaaattgctgaaacttttgagagtacttggaacttcaaattatctgtgactccacctttcctgagtcacacagcagcccattacagcccttttctgtttcttcctttgtgttgctccgtcctgggtttgggaaatggttcatttcctcctctctgcccactagcaatttcacatttcaatttcagctacaggaagggacacaaataaacacctattagaaattatggggtgaataattttttggatgagaaagtttcaaaaatcatgagaggcacctatggcagaccccctagggtcttatataatgtcccctccgtatgtctctgcttttagacacagctgtgctgaatagttccatacaagttcagatgcacctagcactaatggtgtccatgagtacctgtgtgcatcttgttcaatgcccaggacattcttcagtgccacaggaacctgctagacccatggacaagtgcagtccagggtaaccctcaggcagagggggacaggaataggtgatgatccagcctcctttcctttggaagaatcattcttggaggccctggctgactggagctcctgatctccacagtcgcaacctggataattacctttatatgatcttttgctcctctgttttactgtcctccatctctcctgtgatcactttccaaataaactaccttaattcaattccttgtctcagcctctgctttgaagggaacccaatctgtgttcactaggagacaagtgagaaagcattctgaagtccatttttgctcttagtaagttaagaagagtatacttattctgggccaagtgcggtggctcatgcctgtaatcccagcactttgggaggctgaggtgggcagatcacttgaggtcaggagtttgagacaagcttggccaacatggtgaaaacctgtctctactaaaaatacaaaaattagctgggcatggtggtgggtacctgtcatcccagctactcgagaggctgagccagaattgcttgaacttgggaggaggaggttgcagtaagccgagatcataccactgcactccagtctgggcagtagagtgagactccatctcaaaaaaagtaaaaagaagagtatacttattcactcccgatgttttatttggttaagtggggtgacatctattcccattttttatctctctatgcttaatatgctgttgccacactggccttctttctgtttctcaaacaaaccagcctattcctgtcttagggtgtgtggaggagttgttccttctgcctggaacactttctttctgtggcttcacatgactggcagcatcttgtcattcaaatctcaattcaactgtcactttctcaaagaaaacaaccttgatcaccaaaagtagccaccatatacacactcccaacaccgtaacatattactttgttttttttcttcatagccggtataaatttatctggttaatttattgatcacctatttcctcctcaaaacctaagatccaagtacaagtaggtactcaacatacatttgctgattaataaatctcctgggccaggcatggtggctcatgcctgtaatcccagcactttgggaggccaagtaggcagatcgcttgagcccaggagtttgagaccaacctgggcaacatggcaaaaccctgtctctacaaaaaataaaaattaaaaaataagctggggatggtggcatatgcctttggttccagctactggggaggcagaggtaggaggatctcttgagcccaggaggcagaggttgccataagctaagatcgtgccactgcactccaccctggattatagagtgagactctgtctcaaaaagtaataataataaacccaataaatctccttttgcctgtaaagaattgataatgttttcttggacttgtgtgcaaaaataaatacagatttttaacagagactgctcagctcaccagtgtctgggaaagggcagcctagcctctccctctacatatatcaaagggttggaatagagcattccaaagaatgatctaagtagaaacctctgaaggaaaatctctatgaacattccatttgccttatgaggagcttaaaatttagctccccactgaagaatttgtttcaccttcagtacttggttaggcttgcattaccttatccaatggcctctttacctctttggcaaggtctaaatttgtcacagatgtgggattttttgttttgtttttacaaagtctaagtttgtcacagattgtaggagtccaagtgagacaaagtagagttggggcttggcttcattcagctcacccccaactagagcattcccactgaaatgctcacacaactacgtcactgctaatagtccttttacttaaagaattccaggaactggccttggagataatcaaggtcacagagtgttccccctcaggaaggaatgctgaacaactgatttacagcctggttgccctggccagaccaccagctggcccattactcaagaaaaccatcacaatcagatatgctgacctgcataccctacccatcacgtgttttgtccagcccagcctgcataccctacccttgatgtcaattctcatgctttgcctaccaaaaaagccctaccagctcttcagggaattctttcttttgtgctgcctcccttatgtctcagcataagctccaatgaagccttgtctgggaaagctcttttggcctcatgtcaatttcttttgcattgagagcccaagaacccatggtcagtaacataaggagacatgacaactaaatacaatgtgggatcctggattggatcccggaacagaaaaaagatattagtaaaaaaactgataagatctaaataaggattgtcatttccttaaataaaaaaaaaaagtaactatgaaaaatagaatagatataagactaaggtaggccattcccagaatccagctttgaaatactttgcctccttatcacagaatcaaaagtgcttcccagcccaggcgtggtggcttacacctgtaatcccagcactttgggaggccaaagtgggcggatcacctgggatcaggagttcgagaccagactggccaacatggcaaaaccccatctctactaaaaatacaaaaaattagccaggtatggtggcaggcggctgttatcccagctactcgggaggctgaggcaggagaattgcttgaacccgtgaggcagaggctgtggtgagccgagatcgccccattgccctccagcctgggcgacaagagtgagactctgtctcaaaaaaaaaaaaaaaaaaaaaaaacaaaacaaaacagtgcttcccagagttgagaaactgtccctgcatgaggaagaggatacatgactttaaagaagtttcctacccatcatcttttttcttctcccctccctctttccccattcttctctctccctctcaaatatattttgaatatgttatgcctgtatgaggtataaaactcagaaagtacaaaaatatatgtgtagttcagattaatagtaagtgtggtaggctgaataatgatcctccctaaaataaaatatttacatcctaatccctggaacctgtgaatgttatcttatatggggaaaaaaagaactttgcagatgttattaagttaaagatcttgagatgggcatattatcttgcattatctagggggctcctaaataaaatcacatgtatctttgtaagaggaaagcagaaggagatttaacacagacagaagaggaaaaggcaatgtgaccttggaggtggagactggagggatgtggccacaagccaaggtgggctagcatccaccagaagctagcagaggcaatttgactgtaatgtgtctagctaaggttttttagtttattccacttgatgttcattgcactcttgaatgtattgtgctttcttcaaattcgacaagttttcagtcattatttcttcgaatattatttccacccttttctctctctcctctccttctggaactcttattgtttgtattttggtacacttgcaggtttcccacaattctctaaggcctttattcttattttcttgctgtcccccagattggctctcagtggacttgtcttgagatttgctgaagacaaacctgagacaggatcttgctctgtcactcaggatgagtacagtggcacaatcatggcccactacagcctcaaactcctgggtttgagtgatcttcctagctcagcctcccacctcggccatcatgcccagctaatttttatttttatttttagagatggggtctcaccatattgcccaggctaatcttgaactcctgggctcaagtgatcctcctgccttggcctcccaaagtgctgggattacaggtgtgagccaccacaccaagctgcttttgtgtgtttgttttcaagatgaggtctcactctgtctcccaggctggagtgcagtggcacaatcttagctcactgcagcttcaaacctgtgggctcaagtgatcctcctgcctcagcctcctgagtagccaggactacaggcatatgccaccatgcatagctaatttttaaattttttgtagagatggggtctcactatgttccccaggctggtcttaagctcctggcctttagcaatcctccctcctcagcctcccaaaacactggaattaccggcgtgagccactgcacccagccccaggtttggtcattctttgtcaattcaaatccactgttgagcacctctagttaatttttcatttcagttcttacacgtttcaactccaaaatttctattttgagctaatttctatcctttattgatatcctctgttggcgagatttttgtcatactctcctttagttctttttttttttttttttttgagatggagtttcactcttgttgcccaggctggagtacaatggtgtgatctcagctcaccataacctctgcctccctggttcaagcgattctcctgcctcagcctcctgagtagctgggattacaggcacgcaccaccacacccagctaattttgtatttttagtagagatggggtttctccatgttggtcaggctggtctcgaactcccagcctcaggtgatccaccggcctcagcctcccaaagtgctgggattataggcatgagccattgtgcccggccctctcctttagctctttagacttactttcctttagttctttgaacatatttataatagctgatttaaagtctttgtctgctaaagtcaaaatctggacgcacccagggacattttcttattcttttttttttttttttttttgagacaaagtcttgctcttgtaccccaggctggagtgcaatggcgtgatctcggctcactgcaacctccgcctcctgggttcaagtgattctcctgcctcagcctcccgagtagctgggattacaggtgcctgccaccacgcctggctaatttttgtatttttagtagagacggggtttcaccatgttggccaggctggtcttgaactcctgacctcaggtgatccgcccgcctcggcctcccaaagtgctgggattacaggcatgagccaccgtgcccggatgacattttctgtttgctgctttttgtcctgcatatgtggcatactttccagaggtggtggtggtggttgttttttttgttgttgttgctgcttctctggtgactttcttcaaataattctgtagattctgtattctctgcattgtgtggcaattgagttctctgctagctttaaaaaaaaaaaaattataagccagaattcctaggtgtgatccctgggtcaataaaatttagtgatcaaccaatgatcagtcagaagaattcctttaatgccctttaatgctttgtctttctgtcctctcttctttgccaagggaatctgtgtgagaaggcatgccttcatacttcaggcagtttacaagacagccttagctttcgttttctgcttgctacagagccttaaggtcagccagaagcgagtgactggaaacttcttcattcccatctctctcctgggtaagtgcacagccttgtgcatgcatgcagccttttagatcccctgaaatatgctggaacttttcgaagttccctatgtctagttcccttttctagttccctatattgtctagttctccaggacgtacttttagattcccagcctgtctcttgcttaccccaattgaaattacagtcttagcctcaacattgctagcagatggctcttgttttgttaatgccttgggagtcgggcattttttctgatgagctgagttctaagtcatcaagtaattacaactccctaggaatagagattttccagagagctgcaattttgaactaaatattggctgtactctggggatctttcttttaactgagcgccacaagaggtcagcccttgccattggctgtgagactgctgctctcggctacctctactgagctgaggagggagggtggatgggaatagcatcccagccacaagttaaaatatcacagatcacactgtcttagcaaagtttaacagcttctctttctagagttctaaaatggttggccttagtggttttgccagtatttttctttgtttttgtgggagagcaagttcaccgaaggtgaactattctggaagttaatctccaggcaaactcattcttttttctttttctttttctttttttttttttttaatgagatggaatctcgctgtgccacccaggctggagtgcagtggcgcgatctcagctcactgcaacttccacctcccaggttcaaccaattctcctctctcagcctcccgagtagctgggactacaggcacacgccaccacacctggctaatttttgtattttttagtagagacagggtttcaccatattagtcaggctgctgtcaaactccagacctcagatgatccacccgcctcggcctcccaaagtgctgggattacagacgtgagccaccgtgccaggccaggcaagctcattctttctttctttctttctttttttttttttttttgagacggagtcttgctctgtcgcccaggctggagtgcagtggcgcgatcttggctcattgtaagctccacctcccgggttcaggccattctcctgcctcagcctcccgagtagctgggactacaggcgccagccaccacgtccggctaattttttttgtatttttagtagagacggggtttcaccgtgttagccaggatggtctcaatctgctgacatcgtgatccgcccgccttggcctcccaaagtgctgggattacaggcgtgagccaccgcacccagccgttccttcttttttttctttttctttcgtttttttatttttttgagacagagtctctctgtgtcgcccaggctggagtgcagtggtgcgatctcggctcactgcaagctccacctcccgggttcaggccattctcctgcctcagcctcccgagtagctgggactacaggcgcctgccaccatgcccggctaattttttgtatttttagtagagacggggtttcctgaccttgtgatccgcccgtctcggcctcccaaagtgctgggattacaggcatgggccagcgcacccggccgctcattcttaaacatggttcttctcaagtctcctacatttctgcagggaaagtttttaaagtttgtcctgttttcatcaagctcaaggccagactatgaatcttcataacaatatgatttaagcttattctgattctgatgtggaataccccagctatccttaaggtgtatttttttttaaaatggaactcccagaggttcatggaacatattttataaagagcatcccactagccggctgtgtggtagaaggctgtttactgatagtagcatcctaaaccaaagataactagatgatttacaagggcaagagaaaaaaagaaaagaaaagaagataacttgagtactgtcatgttttctgcacaggagaacttgtgcaattgctggaacaaatccaaatagattattctggttctgtttattttcgttttagagacagcttcttgctatgttgcccaggcagaacttgaacttggttgtgttttcttatcatccaggatgtgttcttatttatttatttatttatagataaataaatctttgtttctcaggctggagtgcagtggtgtgatctcgactcactgcaacttccgcctcctgggttcaagcaattctcctgcctcagcctcccgagtagctggaactacaggcattcgctaccatgcccgcctaatttttgtatttttagtagaaacagggtttcaccatgttggccaggctggtctcaaactcctgacctcaggtgatctgcccaccttggcctccccaaatgatgcgattacaggcatgagcccaggatgtgttctttatctatcattaccacctgtggggaaaggcaaagcactgtggactatttgagatgaggtgctaattcttcctacttaactcaaacctttcacctggcatttcattgttttacctggagccaatcaataataccatttctccagacttctcagtccctccccctgagaatcagttcacattgtccccatgtcattcatgactttactgctgggacacaaactgtgcctttttggggtctcagatggtagtgtgacagaatatacactttctgtctttaatgagcttttattatcctacaatgattgagtgtggatgaagaaatagacacctactcctctatctccaaacaactgattaaaataatcaaaggggccaggcgtggtggctcatgactgtaatcccagcattttaggagactgaggtgggcggatcacttgaggccaggagcttgagaccagcctcggcaacatgctgaaaccccgtctctatcaaaaatacaaaaattagctgggcatggtggcacacacctgtgatcccagctactagggaggctgaggtgggagaatcacttgaacccaggaggaggaggtggcagtgagctgatatcatgccattacaccgcagcctgggcaacagagcaagaccctgtctcaaaataataataataataatcaaaggaaaattagcatcagtgataaaaatatacatattgggctaggtatggtgccacatgcctgtaattccagtgctttaggaggcccaggtgggcggatcgcttgagcacaggagtttcagaccagcctgggtaacacggcgaaaccctgtctctacatatatatggtgtggtggcacatgtctgtagtcacagctgcttaggaggctgaggggggtggatcacttgagcctgggggattgaggctgaaataagccgagatcatgccactgcactccagcctgggcaacagaatgaaaccccatctcaaaaaaaataaagataaaaaaataaaaaatacacacacagacacacacaactgattaaacagtggaagggagagaaatataccccagtgatagaagaatttctgccagataatggttacctaggactgaatgctagggtaaaactcatgtatatatctacttgtaagaaaataagagaatagcgcagtatcatgagaattgagaacaggaactcttgacagacccctgctaataactactaatcacagattcaagatctagaaaaagctgtttcttgaagatttgtgggccattttacttggaatctcttttcatgggcaggacaaaaatacttgaaggtaattgcacagagtttaggagagaaaaggaggccataaaaacaggaaaatctgtggtgaggttctaccctgactggaacatctcattagagcaggtagatcatctcaacactgggagaagtttccttattcttatgggcaactgaccccatggggcagtttccctcacctcaatttacaaaacagccaggaagggaaccacacactgctatgccttgtacctgaaccacaagccagtccaaacagaaaaacaggtatcaggctgggcatggtggctcacgccggtaatcccagcactttgggaggccgaggcaggcagatcacgatgtcaggaaatcgagaccatcctggccaacagggtgaaaccctgtctgtactaaaatacaaaaaattagccagatgtggtggcatgcacctgtagccccagctactcaggaggctgaggcaggggaattgcttgaacccaggaggcggaggttgcagtgagctgagatcgcaccactgcactctaccctggcgacagagcaagactctgtcccctcaacacctgccccccgccaaaaaaaaattcactaaacagagccctaaagaggctatactgttaagtggttgtgaatatagccgtggagttacgttgtctcagtttaaactctatcatttattttctgtgtgaccttgagcaagttattttcttcaggtgccagttttctcatctacaaaatagaataatagcacccacctctcggaagtgttgtaagaatcaactgaatttatacacgtaaagtccttaaaataatgccatgcacacagaaaagtctcaataaatgttagctgttataggaataataatattattattctttttgcaacttcaaacaaatggtcatcttgaattatgaatatggatgtggcctttttttatttgagacagagtctagctctgttgcccagactggagtgtagtgtcgtgatcttggcttactgcaatctccgcttcctgggttcaagcgattctcctgcctcagcctcccaagtacctgggaaaacaggtgtgcgccaccacgcctggctaatttttgtatttttagtagagatggggtttcaccatgttggccaggctggtctcaaactcctgacctcaagtaatccgtccgccttggcctcccaaagtgctgagattataggcctgagccaccgcacctggcctggatatggcttaaaagttgatttaatccaattccctcccaagacttttgtgaaactgtgactcaatagaaaaattgacttcttggtgaagcatttactacattatctcatttaaccctctgtgagttatgtacctttgctgtccccattttaccattgagaaacaagctaagagaagttaactaatttgcctaaagttttaaagtgttaagtggtgaggaggattagaagccagagcttcttctttttttttttttttttttttgagatggagtctcattcttgttgcccaggctggagtgcaatggtacgacctcggtttactgcaacctcctcctcctgggttcaagcgattctcctgcctcagcctcccaagtagctgggattacaggcacttgccaccatgcctggctgattttttgtatttttagtagagatgggggtttcactgtgttggccaggctggtctcgaactcctgatgtcaggtgatccacccacctcagattcccaaagtgctgggattacaggcatgagccaccatgcccggtggaagccagagcttcttgttctgaagtccatctcccttataaattctatgccagtttgcttaaagtcattgaattcttaagtttctacatcacaacacttaagcaaggcgtggtgacctgtgtcctatatagtgggaggctgaggtgggaggattgcctgaacctggggggttccaggccagcctgaaaaatatagtcagatcccttctcaaacaaaacaaaataaaccacatattcaataactgtgagaattttcaagcaggtgtttctagttgtcagccaaagaacaatcttaattctttcactgcaccacataacttcctggtcaacttgtctggatgaattaattgcaaatattcctttaataaataacaaaacaagctgggtgaggtggcttgcacctataattccagctacttaggaggctgaagtgggaggatttggccaagagttccagaccagcctgggcaacatagcaagaccccatctatatcttttttttttttttaattagccagatatggtggcctagcagctgtagtctggcctactcaggaggctgaggtgagtggattgcttgagcccagaagctggagactactgtgagctcccatcatgccactgcactttagcctgggtaacacagcaagactctcaatcaatcaatcagtcaatccacaaatagactttctgtatagtgttatgagagcaactggagagcaacaagccttcacctaatgttcatagttccctctcccattgccctcccccttgctctcagctgacaatttcctacttcacagagaagatacaggccaatgggcagtggattcttcagggtcctaccctgccccataaaccaacaacttatctgcaaccctgtcaattcttgctttttccttttcttctcagtcgtgaaattctctctcttttaagatgattttctccacacatactctaaatcaatggtcacctgaagattgacagaaagttaattcttatgccccatcccagacttactgaatcagaaactctgggagtggggccagcattctctggattaaccagcctatcaggtgattctgatgcatgctgaagtttgagaacaattgttctaaatccttattattcaaagtggcccatggagtggcaactttggtaccacctgagagcatattagaactgtagattcttggatgccccctagacctaatggagctgaatctgcatttaataggatcctccagatgattacaggatccccagatggttcatgtgcatgttaaagtttgagaagctctgctctaaataataatctcttctcagggatatttctcatttttccctctctcttttactttttctactgttttggatttttcctgtcagcatttttttaatttttatgtttttgagatggagttttgctcttgttgcccaggctggagtgcagtggcgtgatcttggctcactgcaacctccacctcctgggttcaagcgattctcctgtctcagcctcccaagtagctgggattataggcatgtgccaccatgcctggctaattttttgtgtttttactagagacgggggtttcatcatgttggccaggctagtctcgaactcctgacctcaggtgatccacctgcctcggcctcccaaagtgttgagattacaagcatgagccactgcgcctggctcctgtcagcattttaaaaatgagtatgtctctttaatattaaaaaatcattattctgggtgggcacagtggttcacacctgtaatcccagcactttgagaggttgaggcgggcagatcacttgagcccaagagttggagaccagcctgggcaacatggtaaaactccgtctctacccaaaatacagaacgttagccaggtgttgttgggtgtgcctgtagtcccaactactcagcaggctgaggtgggaggatcgcttgagcgcaggaggcagaggttgcagtgagccgagatcgagccactgcacttcagcctgggtgacagagtgagatcctatctcaaaaaaaaaaaaaaaaaaagttttaatgaaaaaataaaaatgtcattattctatttactttttagctacttctctctcctattcacagacaagcttcttaaatgacttacccatactgtaaacagagtctttttctcttcacctcactcactcctcaatccctatcagcctgacctgtccctgccaccctactggaaattcttgagcgagggaaacaagaaaccccttatggataaatccactggatgattttcagttgtaaactcacttgacctctctacagcatttgacgatattggccatgtttgccttcttaaaagtctccttagatttttgaataagacattctttccatcttcttctatctccctgaccactcattatcatctttctttggtgtcccctgctcctacacctagcctgggtatggctagtgagtgggcctacttgatctaaaacagagtttcccggtctcagcactcttgactctttgttgcagggggcgggagggtggcagggggaggcctcaggggtgggggtgtccttctgtgtgtgcattgaaggatgtttagtagtaacatccttggcctctacccactagacactagtagcatttcctctcctcaagttgtgacaatcgaaaatgtgtccagatattacagaatgtcccatcaggggaaaaattgcccatggtgagaagaaagggtctaaaagcaatcagatcagatgtgacctggttctggtaaacagtaagacatccttgctgaaaatttctaggaaagttctctctcttttattttttttttcagatggagtcttgctctgttacccaggctggagtgtagtggcttgatctcggcacactgcagcctccacctctcgggttcaagtgattctcctgcctcagcctcccgaatagctgggattacaagtgtgtgctaccacgcccggctaatttttgtatttttagtagagatggggtttcaccatgttggtcaggctggtctcaaactcctgacctcaagtgattcgcctaccttggcctctcaaagtgcttggattacaggtgagagctataacacctggcctgctaggaaagttctttatttgagaaaaagctatgggatgttattctttctctcccgtcacatggggaagcatgtagtattgattgccacaggtagctatcttatagctctggatgaagaatgaggtggtttctgatgacatagctggatcaaccagttctgatgtcagcccttcctctggatttagtcctggctaatacacctttcaaactcacttactcatctgatctcctgttgtcccatttccttctccctctttgtctctcagcccgtccccttcagattgacattttatttgcagtttggttttctaatttatttttcccagtagatactaacttttcctctatctttttccacattttacacggaggctagcatctcaccattgtcacaatgactgccagttcccaggcctcaacctggaatctcagaagcaactctttttgtacagctgaggggcacctggaacatagaagttaagaagagatctggctgggatcaagaaacctcttttcactgcacctgaggctcagttgtgccctctgctgacactaggtcaggaggctggacagctccaactggaaacttggagcagggttttaagacctctgctttctcactttgaagaattggaatagaaaaatagaaaatacaaaaatgatgagtccttggaattgataggacacgtagacttgagagacttgaacatgttttttgtctgtttgattcccttctctattcccagtgtttcgagcagttctagtccatggtaagtgctcagtaaatatttgtgctgatgagcaagcaaaaggctgttctgctgtgaaaggtatggtggagacccttatgctcctagaaagatgcagagaacaattgccttgtttcctgacaagtccctgtccaaggtcctcatcaggcttaggtaggcttcctgccctctggttctaggagatatccctatatgtgtgtaacaaatcatttttttttcttatactatattgaggggtttggcatagattgccagtctttttttatttttatttttatttttagacagagtcttgctctgtcgcccaggctggagtgcagtagcaccatcatgactcactgcagcctcaacttcccaggctcaggtgatcctcccatctcagcctcccaagtagctgggattacaggtgtgggccactgtgcccagctctaggctggtcttgaactcctaggctcaagtgatcctcccgccttcgcctcccaaagtgttggaattacaggtgtgagccaacaagcctagccaataaactgagcattctttttattttattttattttatttatttatttatttatttttgagaaggagtttcactcttgctgcccaggcaggagtgcaatggcgctatctctggctcaccgcaacctctgcctcccgggttcaagtgattctcctgcctcagcctcccgagtagctgggattacaggcatgtgccacaatacccggctaattttgtatttttagtagagacgggttttctccatgttggttagggtggtctcgaactcccaacctcaggtgatccgcctgcctcagcctcccaaagtggtaggattacaggtgtgagccaccacacccggccctgaacattcttttaaataattcagatgggctgattccattcagggggtcccatatatggagctttacttaatttgaagggtgaaaggggcaaatgttaataaatcacggttcctatgctttggcatctgctgagatagctttttctgctacttctcttgacatcctggcccctgtgaggaccatgatgttccttgggtgcatctcccaaatcccaggagcacagtttctactatcctacaacctcaccatgctgggcaaggtagaggtaaggcttaaagactggtgcctgccttcccaggttggcccaagaaaatgaggcacatattctgttgcaactgagccccaaaccatctggaggaattcagttgactcccctcacgggcccttgcatgtggagagggccaggaacaggataacttacttttgaacacaccactatctaagttctttagttttttctccagttctcctccccttatagcttgtagaattattttttttttctgagaactttaaaacattttattttgttttgttttgttttgttttttgagacagggtcttgatgtcacccaggctggagtgcagatcatagttcactgcagcctccaactcctacgctcaaatgatcctcctgtctcagcctcccaagtagctgggactacaggtgtgtgtcaccatgcctagctaatttttaaatttttcttttgtaaagatgggggtctcgctttgttggtctcaaattcctgtcctcaagcgatcctcccacctcagccttccaaagcactgagccactgagtccagtctttttttattaaatacagaaaaatatggagaataataaaatgaacgtgtgtcctcactaccaaggatcaaagattattaacattttgtcatatttctgctgtattttaaagaaatacaaaaattacagataaattttatattcttttacctcttgctctgcaccccagagtcccattaaccatgtcctctccccaagggtaacaactaccatatttgtttgtatttttccagtacaatttttagattttacgtacattagattactttatactatatatattacacaaattattttactttagcaatatatgataatgtcttttttttttttttgagatgaattcttgctctgtcgcccaggctagagtgcagtggcgcgatctcggctcactgcaacctccacctcctgggttcatgcaattctcctgcctcagcctcctgagtagctgggattaggtgtgtgccaccatggccagctaatttttgtatttttagtagagacggggtttcaccatgttggtcaggctggtctcgaactcctgacctcaagtaatccacccaatttggcctcccaaagtgtcagggttacagggatgagccaccgcgcctggcctataataatgtcttgaatgtgtatgaaatgtatataaatatgctatgccatatcaatttgtgtattcatttcaaatcatcctcttaggactgggcatggtacctcacacctgtaatcccagcactttgggaggccgagatgggaggattgcttgaggccaggagtttgagaccagactggccaacatagtgagaccccatttctattttatacaattaaaatattggctgggaacagtggctcatgcctgtaatttcagcactttgggaggccaaggggggcagatcacttgaggtcaggagtttgagaccaacctggcaaatatggtgaaaccccatctctactgaaaatacaaaaattacctggacatggtggtgggcacctgtaatcccagctacttgggaggctgaggcagaagaattgcttgaacctgggaggcagagactgcagtgagcctagatcacgctactgcactccagcctgggtgacagagtgtgactctgtctcaaaaaaaaattaattaaattaaattaaaatattaaaaataaaataatccacttaggctggtgcatggctcatgcctgtaatcccagcactttgggaggccaaggcaggaggattgcttgaggccaggagtttaagaccagcctgggtggcaacatagtgagaccctgtctctacaaacaatacaaaaattagccaggtataataatgtacacctgtagtcccagctactgaggaggctgaggtgggaggatcacttgagtccaggaattaaatgttacagtgggctatgagcctgccactgtactccaacctggacaacagagtgagaccccatctcaaaaaaaaatttataaaaatgcaattatttggccgggcgtggtggctcatgcctgtaatcccagcactttgggaggctgaggcgggtgaatcacctgaggtcaagagttcaagaccaacctggccaacatggtgaaaccccgtctctactaaaagtacaaaaaattagccgtgcatggtggcaggcacctgtaatcccagctactcaggaggctgaggcaggagaattgcttgaacctgggaggtggaggttgcagtgagccaagattgcagcactgcacttcagcccgggtgacaagagcaagactctgtcaaaaaaaaaaaaaaaaaagcaattattcctttactatcttgtaatattatttttgagatgtttccatgttgacacagtgtaccagttaggaatgcttctggctaaagataacacgaaacccaaccaagagtgatttaaacaaacgaacttttttctctcacatacaaatattctggaggtcgatagctgttggcattttttttcccataactcagttatgtcagggacagaatttctgtacttctggcactttcttcacggctgtatgcagggggaaagtgcagtgccagctgcatttgtctctagaatccctcaacaaacttccatttatatctctgatcagctgggcacggtggtgcacctgtggtcccagctactcaaaaggctgagcccaagagtttgagaccagcctgggcaaaataatgataccccttctcaaaaaaagaaaaaaaaatctcatcgatcattattttcccatggcctacgtgcaaaggagcttaggaaagaggataattagtcttttcagccccatagagaaggtggcaaatggagaaaagagtcaggaatggttgctgggtcagtcaatgtctagtatattattcctaaaagaatatttcttgtgactgctatcactgttatatggattttcttacttattccactactgatggatgtttccaatgtttgccatttcaagcaatgatgcaatgaacaaccttgtatatgtcttcttgtgaatttgtaaaatctttatcgtctccattgcacaaaaaaactggctctgctaaattgtatatttttgcataccaggatatgtttttgaaacaaaaaagctgaatgtttaactttttttcctctctaacatcatgttcctgaggcacaaacccaaatatccttcagtgagggaaggatcaagagggagtagggatgtctaggggtggaaagctagtgaacattataaaaataatttcctgctaaaaagaaattataaagtcttaatatattagaaattatattctgaattagtacataaacaaaaactaggacatcaaaaagactcacaaagaagcagaaatctcagaacagaccacacaggatgaaaagaacagtgcaacacaagaattcagtatagttaggagctcaaacaaacaagaccaatcatactagttacagggtatcctcaattccctagcgaggaggaacaggagatttttatctgtgtcagtaaagattctttacattgcaagtgaagaaaaatccaaggcaaactgctttcactagaaaaggaaacagaaaagactattgctaagtccagtgatggtcatgactttatccaaagttcaaatcatgttagtaggacctagctcccagatcctcttcctctgagtgttagcttcattttcaggcaagttcctttcctggtaacagaatggctgtagcagtctcaacttcacattcataggacacagaatcctgaagaagaatttagcttatcttccagtagcttcattttattagggagaggtttttctttcccaagagccccagcaaatatccttatatctcactgggcttctgactaggttatgagttcattaatgaaccatcagtaaggccatggagatggaatatgttgactgacctaacccagtctgagctctcccagagctgaggctgagaccaattctacccaatcacatagcttgagagtaggggagggagtgattacccaggataaaatctttgtattatttcaccaaaagaagggtgttcaacccagcgatctcgttactgggtatacacccaaaggaaaataaatcgttctaccgaaaggacacatgcatccatgtgttcattgcagcgctgttgacaacagaatcaacccaggtgccctcaatggtgaattagatttaaaaaatgtggtacgcatacaccacagaatactatgcagctataagaaagaacaaaatcatgtcctttacagaaacatgggtagagctgtaggccactattgtaagcaaattaacacaggaacagaaaagcaaatacctcatgttctcacttataagtgggagataaacattggatacacatgggcataaagatgagcgcaatgacactaggtactaaagggggaagagggggtggagggcaagagctgaaaaactacccattgggtactatactgactacctgggtaatgggttcactcataccccaaacctctgcatcatgcaatatatctttgtaacaaatctgcacatgtaccctctaatgtgaaaataaaagttgaaaaagaaaaaagaagggtgaatggatgttatggatactggaaaggaaaaaacaaaatgtccactaaagtatcagaacatactttatatgatttttagttaattatatgtaagcaggtagagtaagccatattaatctcattacaaagacagtctgtcattgtccgtaaatcctttgacttatttaccccatttttcattaaaacccatccaagaataattacaggccagaagcactttccactaatcaccacttaaatgataagcctaatcattaaatgataaaactaaatcagtgccctcgattgcctgtaaaagaagatactgagctagacacagtggctcacgcctgtaatcccagtactttggtaggctgaggtaggaggatcactagagaccaggagtttgagaccagcctgggcaacacagcaagactctgtctctacaaaaaaatccaaaaattagctagatgtggtggcatacccctgtagtccagccatgtgagaggctgatgtgggaggatcacttgagcccaggattttgaggctccagttagctatgaatgtgccactgcactccagcctgggcaatacagcaagaccctgtctcagaaaaaaaaatgtatagaagcccagtgcgtgctgaacccttggagatagacttcaaccctctgatcctctgatacatccatacactgctgctcccactgttgagttaatgcttgttcactaacctgtttgttccagttgttcttgttttaattacatatttaagtaaatgttacattatgtgatgaaataagagtggaggaaaaataacttctctctatgaaactaaatttaatactttggaaagactcaataaaggcaaattaatttttttttaagacggagtcttgctctgttgtccaggctggagtgcagtggcgcaatctccgctcactgcaacctccgcctcccaggttcaagtgatctcctgcctcagcctcccaagtagctgggattacagacacccaccaccacgcctgactaatttctatatttttagtacagacaaggtttcaccatgttgagcaggctggtcttgaacttggtcttgaactcctgacctcaggtgatcagcctcccaaagtgctgggattataggtgtgagccacccaacctggaccaagcttcctctctttaaataggtgatttaggagttcaagtttacagtgagctatgatcacaccactgcactccagcctgggcaacaggccaagaccctgtttctaaataaataaatagttctgggccgggtgcggtggcttgtgcctataatcccagcactttgggaggccgaggcaggcagatcacctgaggtcgggagttcgagaccagcctgaccaacatggagaaaccctgtttctactaaaaatacaaaaaagtaaccgggcgtggtggtgcatgcctgtaatcccagctactcaagagaatcacttgaacctgggaggcagaggttgcggtgagctaagattgcaccattgcactccagcctgggcaacaagagcaaaactctgtctcaataaataaataaataaatagttctgaggtcccttctaagttcaattaagttctacatactggatagaggcaagaaaatgtgaaaaaaaaatgtcgtgcccatttaacacaaaggaacactgagtgttttaagataatctgctcctatgctagctcagaaatcaaaattttgttaacatctgcaaacacaaatgtcatgtttaactttagtttctatctttttttttttttttttttgacagagtctcactctgtcacccaggctggagtacagtggtgccatctcggttcactgctgcctccgcctcccaggttccagcgattctcctgcctcagcctcccaggtagctgcaattacaggcaggcgccaccatgcttggctaatttttgtatttttagtagagacagggtttcgccatgttggtcagggtggtctcaaactgctgacctcatgattcaccctcctcggcctcctagtttctatcttaaaggtggtttctctaatttcgtctcaaattctggatggtacactatttggggcataaaatcttctgcagcagaagtgtagtaaatagtactgctgagtaaaactaaaccatgcaataattacctcaaggaaaaagatggtttttccaagttatttaaacaaatagcttttatttaacttttcataaaatggaaaaaaaggaactttttataaagaaaatgcaatgacgcaataaagaccaggccacatctctttagaaaaagaaaaaaaagcctaagtgtatcagtagaactatctgaagagacaaaggtacaaatattctttccccattattgactcagaaaccacttatctgcagaaacatgacagattgaatttccatggctaattaagaacatatacagctttgacacctttgggactctggcagctgtgattccaattttgcgtctcccaccaatttacattcacacacaatgaatgtgacagtggtagtcagattagagtgattattttgttaaatactgagttgcaaaaacaacagggtcagagtaaaggcaggtgtacagaatgtaacctcttgagacacgttatctcacagctgtaaatacacaaagtggctctaatagatggacaatggactactactctccttggtagatgtcactgatattttctagctatgggaagaaacaatagcatattaatgagatttttactttgtttctgaaattaattcttttttttttttttttttttttgagacagagctttgctctgccacccaggctggcatgcagtggcgcgatcttggctcactgcaacttccatctcccaggctcaagtgattcttgtgcctcaacctcccgagtagctgggattacaggcgggtgccaccatgcccggctaatttttgtatttttagttgagacagggttttgccatgttggccaggctggtcttgaactctgagctcaagcgatccacccacctcggcctcccaaagtgctaagattataggcgtgagccactgtgcctggcctaaaattaattctcagagtgtatgtttgaagattttgaactctatgattaaagacatgactcctaaaatgaacaaatcagtggatgacaataggtaaccctgaaatagatccaagcatatataaaaacttactaataaaggaagtatcagtaaccaattggaaacacacttttttgaaagaaattcaaactcactttatgccaaaataattccagataaatttgaatgtaaaaacacattttagccagaaaaatactagaagaaaacataaaattttagtcatatttaagtaatctcagaagtaataagaacgttttattttctgggtttttgttgttgttgttttttaagatatgaggtcctcgttttgctatgttacctttgctagtctggaactcctggcctcaagcaacccttccactttggcctcccaaagtgctggaattacaggcatgagccacaatacctggcttaaaaggacactgaggacattttaagcataaaaccactggaaatataacaaaggaaacttaaaaagatgttttaggatatttttatcccatgttttcttttagtatttaaaaaaaaacatatggccaggcgcggtggctcacgcctgtaatcccagcactttgggaggcagaggcgggcggatcacgaggtcaggagatcgagatcatcctggctaacatggtgaaaccccgtctctactaaaaatacaaaaactagcctggcatagtggtgtgtgcctgtaatcccagctactcggcaggctgaggcattagaactgcttgaacccgggaggcagagcttgcagtgagctgaaatcacaccactgcactccagcctgggcgacagagtgacagtctgtctcaaaaaaaaaaaaataataataataaataaataaaaattaaaacataaaaaatattctaatatctgtaggacaactaatcaccttctttttcaacatcttggctattcttatccattttctcttccagataaatgttggaatcaacttgtcaagtaaaaaaaaaagaatccagttggaattttgattaaagttatatttgtagattaatttgagaccaattgagttgttttctcatctagaaacatggtatgtttttacatttatttaggacttattttttctttagcaacgtttcctggttttcctcatattaattttatacatttcgtgctgagtaaattaattaatcaactcactcaacaactctttgtccgaggctcagagtgtacagcaatgaacaaggcaagttccctgttctcatggagcctatattctaattgggacaaataaacaaaaaagatcagctagtgagtagtcctctgcagataattaaaatagggttatgtgatagagagatattgggtggctacgttagattgggtggttaagaaagtcccttaatatttcaactgagatctgagtagcaagaagaatccagctttgtaaagctgctgggagtggggatggcatttcaaggagagggaaccgctaatgaaaaaaaaaaatcactaagtctcctaatagtttgatattttctgttcaaggaacagaaaaaaggccagtgaagctagcggtgagtggtgaaggggaaagtgttatgaaaagatgttagacaaacatttaggggccaaacagatgattcaggccttcataaggagtttgcatattattttatttttttgagacaaagtctctgttgcccaggcttcaaggtagtggtgtgatctgagctcactgcagcctctgcctcccaggttcaggtgattctcctgcctcagcctctccccctagtagctggaactacaagtgcacgccaccatgactggctaatttttgtatttttagaagtgacagtgttttgccatgttggccaggctggtctccactcctggccttaagtgatctgcccgcgttggcctcccaaagtgctggaataacaggtgtgagccactgtgcctggcctacattatattaaatgtgatggaagccatgtattgagtaaaagaatgacttgatctgattcatggtttttgaaagatcgctatagtacctagcggaaaaaggatagcagagggccaagagtgaaagaaagatttgtgaggaggcgagtgtagtggtccaggtaagaggtaatagtggccagatatggtggctcacacctgtagtcccagctactagggaggccgaggcacgagaattccttgatcccaggaggcagaggttgctagtgagccgagatcacgtcactgcactccagcctgggtgatggagggagactctgtctcaaaaaaaagaaaaaaaacagaacatatttatacacaaatggaaatgacccagaagaggagaaattagtctgggtgtggtgacatgtgccttaatctcagctacttgggggctaaagttggaggatcacttgaggtcaggagtttgaggctgcagtgagctataattgcgcctgtgaataatcactgcaccccagcctgggcatcatagaccccgtctttaacatttagaaagacagagagaaaggagagattgatgaggcaggagcaaggaggataattgttggagcagtaaaactcttgaaaaggagacagtatggaagatatggatagtatcttgaaaaataaagtggatgagaagtgacacgaatagtggaagaaacaaagacggtgggctatgaaaaatgatggggagataccagggatcagtagctgacagcatctcagagtagcagcagtctgcataaattttaaaagcacttgagtttctgagggaggaaggaagagaagtggtttggaggtaatatgaggaataggccacagataagaatacctatgagaggaaaaataacctcctgtacttgaaaagttgcaagggaggtagttttgctaagtgataaaccgggtttcagttggaatgggaagttgatgggaacatttacagaagaggctaagaataaaggggaagtggttgatggcagatgttgaaatcaaaagtgtgaagtgaaatggttaggatatttggtgaagagtgggatatggaatcagagtaattgaagcagagagtagcatggagatactagagcaataaacggatgacgcagatcctactggttgtgattgaggtggaaaggattataaagcatgatggaattatcttttggtaatctcttgggtcaaacgtggtgaacggtaagatgaataatatagagctacacaaaccgttcttgtgatatggaggctgctccctaattacaatgctaatatttcatttaggatttttgtattcatcgttacaaaacagggtctgtaggtttccttttagtgttcataatgcttaggttttactaacagggttatgattacctctccaaacaagctgggattttttttttcaagcgtttccatgccctggaaccatctggtctagtgctttttggggtaatgaatatcttcaattgtatttatttttacttagttgatctattcagattttctacattttcttgagctgattttgcttatttatatttttattgatataaagattttttctatttttatttcttgtgccaactgtatgtacattccccccattcccgtttccatactgtttttaggccatttgaaaatctcaaaggttttacaggaaagtacagattgatgaagaaatggccaaaaacgggaaaagtgaactttaaagtgattcaactacaaaacgtatgctactgagcaaatactagtgtattcctcgctctgcggcttaactccatgaaaatccgtgcaaaggttttagcgttgggattgtgaccgactcggtgaagagaggggacgatcaccaaaccgttagagcactggggctcttggcagtgtttgtcagttattttcaagtgataacttgaagtgataccgcaggaataaaatgctgtatccagagctggtcggaacgagcactacctttaacaaaagctgaaaagatctgcctaggaattcgttagaatacagccctcttacgtctctgacatacctagttatgtgaaccgagactgtgcagctgacggtggaaatttcctaagtgctttttaaacaacagaactggactccctccctcctccattcccagtcgaatacgtcccacccagatccagctcaagggtgcagcacttgttccggccagctcacaatcgccctttggaagggaggtttcccgccatttcgcttaggaggagggtgaactcttctcccttcattctccactcgctgggggcccgagcccacaccaccttcctagcaaagcaagcagcgggacgccaaggccagcaggccgcattaagaacgctggactgagccaaaagcctacacagaccaagccgctcgggaaaggatcaacaactgccgacaacccggagggcgaaaacgcccgcggcgtaggggaagcaaactaggagatgcgcgggcccagcgccagcggcgggaggaggcagcgcggccgtcgcaggcgggagcgaaggcggggacggagggcgggctcgctccactcgactccggattggtcgagcttagagagccgagtgacgtcagcgggggagaacgcctgatttgtgtggtgggcgcgggcggtggggggaagcgcagtgcgcaggcgcaactgcctggctctgctcgctccggcgctccggcccagctctcgcggacaagtccagacatcgcgcgcccccccttctccgggtccgccccctcccccttctcggcgtcgtcgaagataaacaatagttggccggcgagcgcctagtgtgtctcccgccgccggattcggcgggctgcgtgggaccggcgggatcccggccagccggccatggcggggctgtactcgctgggagtgagcgtcttctccgaccagggcgggaggaagtacatggaggacgttactcaaatcgttgtggagcccgaaccgacggctgaagaaaagccctcgccgcggcggtcgctgtctcagccgttgcctccgcggccgtcgccggccgcccttcccggcggcgaagtctcggggaaaggcccagcggtggcagcccgagaggctcgcgaccctctcccggacgccggggcctcgccggcacctagccgctgctgccgccgccgttcctccgtggcctttttcgccgtgtgcgacgggcacggcgggcgggaggcggcacagtttgcccgggagcacttgtggggtttcatcaagaagcagaagggtttcacctcgtccgagccggctaaggtttgcgctgccatccgcaaaggctttctcgcttgtcaccttgccatgtggaagaaactgggtaagttccctggcttgtttggcgcccgcccctttttcaggcagttcagggcttttatggcaccagccccgcgtgggcccccggcacccagagcgcaaccaaagtatacactgatggaagtgactaaaagctgtaatagcgctttgctgggtggaggtccgggcaaaccaagcggccttggggaagataggattgccgtctccctgcagcctattcttgctttatttccatcctccaaggatcaatgggaagcagtccactcccttccctgcttcactttggtggcaaccagaggaaacgtgtttgaaacctggcgccagattttggccaaaagataaatcgatgttgcacctgggccaggcgaaggaaaaactgtagtgtttccttagagaatctgtcataattctgctcctgaaagtcttatccctctcggttgcctcctaccggtggtgtcagttctccagattgacccgggattgctggggttggttgctggagtaaagcgtaagctaatttagaagggctgaaacgtaaccatccggcaacttaaagttttggaaggaattccgttgtaatgatggtgagatgtttttaggatcataaacctgtactgcttatgaaaactaaaaacgcggaacgtgttgttacctcttaaaaactggccccgtgttaagggtgtgcgttagattctgcttgggttttctttttggaaattgccttagctgattgctttcagatagttcccaaccggttgttcctagtttaaaaagtacttataaattgtaactgcccatcaaaataagaaaaggcaaggaattactgtatgctagaaggaaataaaggtcttaaatgtctaaaaatttcggtgtagttgtagtttcatctaagtttttttaaatgtttgtaaagcaggcaggatttctgtgcccaacatttacagaatcatcttacagcattataattgcttatctattgcagtgaataaatggcatgcatctttgttagagcaaagaagacaatacttccagtggtgggaaaaaaccttgtttatggcagcataataacgttgctttattttcagcagagggatagagacatagagaaaagagttagatttagcaaatacagaacatttttagaaaggtattgtcatagagttgtagattagccggtttcaaagtctgttttccatttgcttggctttctgccaagagttagttgattgactcaaaaaccagccactaggcttgttggaggcgtttcccatccatcccaggggcccctctttatggatttattttgtttttgtgtaggcaccgtagagctgaaagcactgtagtgtattgtagaaatatgtgatatcattgactgcagggcaacgagaagtcgacagcagcacaagagaggaagactaggcacagaactatttagagtgctgtttattttgcagtatacttggagtaacatgaatttgccatatgtttgaactttaaggataaaaaatctttaaggtataaactccgttacattagtattaaatttttttttttttaagagacgggcaggggcgggggacgggtgtgggccgccttactttgttgcccaggctgggcaacaagcgatcctgggctcaagcgatccttcctcctcggcctccgaaagtgctggaattacaggcgtgagctaccctgccggaccttcaggaacattttttaataaagcaggggccatgctgttaaatgtaaatatgtatggtttagttttacatacacagacttttcgaattaagctgtcactcttatgatgcataaagtttagagccttatactccagaaaaatgttaaagtttgttttgtaccacagctagacctcagacttcgtcctcaaagcttgaaaaaaaaaaaaaaaaaaaaagtatgctaattattttgggagtcttgacaaaggaaacgaaggtttaaatttttttttcaatcacaaattcttggatggctccacattttctgtaaagtaaactgtagtttgcaatctgcaggccaacccctttcctgtacatattcagcctctccagtaaattatatttgttacacgaatttccattacattagtctctactcaccttttttcaggacacatggaaatactccatttccattttcttggattctgcctctctcaccctgcccccccaacaaggaaaactcaaacaaaaatatatccatcatgtagattcccagtcagtatgttttcttctgtgaagactactttcttttggaattgagcacccttttttctacttttgtagtgctcattggattgtagtaatagttctcaaactttttgctctcagaaccctttatatgcttattgaggaccccagagagtttttatgtgggctacatcttccagtatttactatatgagaaatttaaacttaggcaatttaaaaatatttctttaaaaacaaacttatatgtttatatatatattttaaagaaaaaacacttttttccccaaataagaaatagtggtgggaggagtggggttgttttacattttgcaaacctctttcaatgtctggcttaatagaggacagctgaatggccgggcgcacgcctgtaatcccagcactttgggacacaaaggcaggcgaatcacctgaggtcaggagtttgagaccagcctggccaacatggtgaaaccttgtctctactaaaaatacagaaattagccgggtgtggtggtgcatgcctgtgatcctagttactcagaaggcttaggcagagagaattgcttgaacccgcgaggcggaggttgcagtgagctgggattgggccactgcactccagcctgggcaacagagtgagactccgtctcaaaaaaaaaaaagacagctgaattatcatatccacttctgcactcaatctcttgcgctatttggttgaagtatctaaagaaatagcagccccacatgcatatgtagtaggaaaaaggagaaatattttattagtcttttcagataattgtggatattctgcactaaaatggtagctattttcccccccagagaaaggtggaagaaaagtagtttcttaaagtttgctgaattggaatttgaaaccttagtaatgaatttcatacttaatacgttaagatccattggtctattttgtactttgaacgaatctcatccatgtgtgatttttgtgacatagtgcattagttatttggaaaataatggttcactcagttaagaacgtcctctgaatagcaacacatttcattatacaatatcaaagaaaatcatgtttgttaatatcactgatctcatcagaaaactctttaaatattgggaagctatctagttcactgttgtggatacacattatccaaaatgtatttttcaagcaacaattagaaatgtatcattgagaacaaatactgtcagtttttcttgaagcgaaaagctcactttgttcatgttgaagatgtacaccaaatgcccaagtcttattaacacagtttatcagtctctcaagtaaagatgatggtccatgaaaaatgtggctagttcattacatgactcagacaatcacaggtgcttttcctgtagtatgtaacaaaagcctgtttatgtagtctcctttttgtcatatagaatattaaaaagatatgcagcctgggcaacatggcaagaccctgttgctatacaaaataaaaaattagcttggcatggtagcatgtgcgtgtagtctctgctactccagaggctgagatggagggattgcttgagcctgggaggtggggttacagtgaaccatgatggagcctgtgcactcagcctgggcaacagaagaaaaaagtaggtattcatgggttgggatttaatacaattaatttttattgtgtcatcaaggatattctttttttaattttagtttttgttttttgagacggagtctcactgtattgcccaggctggagtgctgtggcacaatttcagctcactgcaacctcctcctctcaggttcaagcgattctcgtgcctcagccttctgagtagctgggactacaggcatgtgccatcatacccagctaatttttgtattttttttagcagagatggggtttcgccatgttggccaggctggtcttgaactcttgacctcaagtgatccatctgcctcggcctcccacaggcatgagccaccactcctggccaggaatattcttaagtgaaactagcttgctttttttggactgtaattaggtagctgtgaagaatgcagtgactaatggctcaatctggtgccactgccttgactcctgccaaggtaccagtagtttaccagccattgctttctaccatcagtacaaatgtcagcacagtgaaaagggcaaataaactcttagaattattatgaaaatagttttggccttgtagaatccctataaagattacacagaccactgggagatgctagtctgctatagtatctgcctgtcagctaaatcttgaggtctttggggccagagatactgccttactcatctttaattgttttaggattggccacataataccttgcccaaagtagctgctcaacaactagttgagtttagttgaatttctgttgagtgtaagtaaataaatggactttcttccattttttaattaaaatttctccttttaaaaaattgtgctaaaatacagataacataaagtttataccaggccaggcgtggtggctcacgcctgtaatcccagcaatttgggaggccaaggcgggcggatcacccaaggtcaggagtttgagatcagcctggccaacatggtgaaactcagtctctattaaaaatacaaaaaaattagccgcacgtggtggtgtgtacctgtaatcccagctactggggaggctgaggtgggagaattgcttgaacctgggaggcagaggttgcagtgagctgagatcacgccattgcactccagcctgggagaagacgcgagactctgtctcataaataaataaataaaatttataccattttagccatttttaggtatataatttagtggcgttaagtgtattcataatgttgtacaaccatcaccactatcagttttcaaaacttcatcagcccaaatagaaactctgtgtccattaaataatatctcattgtttccccctttcccatctctggtaacctccccattctactttgtactgctatgaatttgactattccagtactccatttaagtagaaaagtgttcttttgtgtctgacttattttacttagcatgtctttagagttcattcatattgtaccatgagtcagaatttctgctgaataatatcccatcatatagatgtatgcatgccacattgtgtttatccagttttctgttgatggacatttgggttgtttccactttttggctattgtgactagtactgctgtgaacattggtgtacaagcatttgtttgcatcccagtttttcaattcttttgggtatgaacctataagtggaattgctggatcatatggtaattctatgtttaacattttaaggacttgccaaactgtttacacagcagctgtaccattttacattcctaccagcaaggtatgaaggcttcaatttccccatattctaacgcttgttaacttttgtattaaaaaaaaaaatcctgatgaatgtggactgtcttacattttaaaattatagcttttctatgttactgagcccttcttgaattatttggtgttaagcttgacctctcttgtctttctaatgatgtgtacgcctcccaaatttacaaaggaaaattttttaaatggcttatttttgtcttgaggtagggagatttggtaaatacagtatggaatgaaagagtatataaatatattctttttttgtgtgtgtgacagggtcttgctctgttgtccaggctggagtgtaatggcatgatcaaaggtccctgcagccttgacttccttggctcaagggatcctcctgcctcagcctctgaagtagctgagactacaggcatgtgcctgcaaagtagctgagactacaggcatgcgcccagctaatttttttttttaattttttttttttatagagacagggtcttgccatgttgcccagggtggttccttaccctgggttcaagaagtcttcccagcttggcctcccaaaatgctgttattacaggcataagccaccacatccaggcctgaatatattctttattaaaaggtcattatttttcttttttctttattcatgatcataagttttaggttatgcctaatttatactcacatatatatgtttactgcccttttattatgcttgccttctaagaaataagtttttttgtttgttttgttttgttttatttttgagacggagttttgctcttgttgcccaggctggagtgcaatggtgcgatctcagctcactgcaacctccacctcccgggttcaagcgattctcctgcctcagcttcccgagtaactgggattacacgcatgtgccaccacactcagctaattttgtattttcagtagaaaagaagtgagactctgtctctggggtttctccatgttggtcaggctggtcttgaactcccgacctcaagtgatccacctgcctcaggctcccaaagtgttgggattacaggcgtgagccaccgcacctggcaaaaataagttttaaagtttgtataggcttttttaggtttacttattggaaataatgttttcattgtcccttcttttgatagtttaaagaagatggtgaatgaagtgcagcttttagctctgtgtcatagtcttatcaatagagtcaatagaaagatgacattctgcaaagggtgatctctggtgtgattacagggaattggccacagtatttgtaaaggaagatgaaatacaaaagtttcatttgttaacttggactgaagatttagagcattcattttaaaagagtatgaccaaggaaatcgtgaagaagttaatcttaacataaattgttggttctagatttggcattactttaatttaaaatggaaagaaaccaaagtggggagagagaattgaatttggagaaacctcttaaactatagaattttaaatgtgtatcttgttttatgttggttgttcgcattttttcatcataaaggatcttcaccttctcataaattatacgttctgaaagagttgtgtgccatattacttatcaagttcaaatttattttttctattttcattatcagtcattacttttgatccttattaggtagtctctccagaattgatatcacttagagaaatagaagcaatttaaattctcattagtttctacattatgcaggtaaaactagatttctttgcatctttatattatgaaatattcaaaaagatgtaaaatgattaaacaaacacccatccataactcagcttaaaaaataaaacattaccaggccgggcatggtggctcacgcctgtaatcccagcactttgggaggccgaggcaggcagatcatgaggtcaagaacctgatgaaacccagtttttactaaaaatacaaaaaattagctgggtgtggtggcatgcgctggtagtcccagctacagtgagctgagatcaacgacactgcactccagcctggcaacagagcgagattctgtctcaacaataaataaataaataaaataataaaacattaccagtatagttaagccccttctctctgtgtcatattacatctttttcactccccatgaggggcaactgcttctatattcagtgtttatcatcctcactattttttttataattttattaggtatatctttttttttttttgacacagagtctcgctctgtcgcccaggctggagtgcagtggcgctatcttggctcactgcaagctctgcctcctgggttcacaccattctcctgcctcagcctcccgagtggctgggactacaggcgcccgccaccacgcccggctaattttttgtatttttagtagagacggggtttcaccgtgttagccaggatggtctcgatctcctgacctcgtgatgtgccctcctcggcctcccaaagtgctgggattacaggcgtgagccaccgcgcccggcctttattatgtatatctttaaccaatatacagtacattttgtattttgtttgtttgtttgttttttaagacagagtcttgcttaatctcccgggctggagtgcaatggcgtgatctcggctcaccgcaacctccgcctcctggattcaagcgattctcctacctcagcctccccagtagctggaattacaggcgcgcactaccacgcccagctaattttttgtatttttagtagagatggggtttcaccatgttggccaggctggtctcgaactcctgacctcgtgatccacccgccttggcctcccaaagtgctaggattacaggtgtgagccaccgtgcccagcctgcatggtttttataacttatatatgacatcttactatatgtatgctattgtcatcccttatgtgttggtttcactttctgcagtttgttaactttgttcaatgttgaaatattaaatataaaattctagaaataaacaatttgtaagtttaacttgtgtgctgttgggagtagcatgatgaaatcttgtctcgtcccactgtgtcagccctggatgttaatcatttctttgcccagcatatctacgctgtatatgctacctacctgttagtcacttagtagcttgttagtcacttagtagccatcttgggtgtggttatcggatcaactcttatggtattgcagtgtttatgttcaagtgactcttattttacttaataatggacccaaagagcaagagtagtaatgctggcatattgttatacttgttttattttattaatgttgttaatttcttactgtgcctaatttataaattacattttatcatagatacgtatgtataggagccaagcacggtggctcacgcctgtaatcccagccctttgggaggcagaggtgggcggatcatgaggtcaggagatcaagaccatcctggccaacatggtgaaaccctgtctctactaaaatacaaaaaactagccgggcatggtggtgcgcacctgtagtcgcagctactcaggcggctgaggcaggggaattgcttgaacctgggaggtggagattgcagtgagccgagatcgtgccactgcactccaacctagcaatagagtgagactgtctcaaaaaaaaaaaaaaaaaagatatgtatgtacgtataggaaaaaacatagtgtatataggatttggtactatccaaagtttcaggcatcctttgggggttttggaacatatgcccctgcgataagggggtactactctattcttctgggtcttacttttttggttcagtattgtatgatttcttcatgttgacacacgtagctctagttcgttcattttcacttatggatagtataaatataccaatattgtgctcatccattgtatccttgaaggatatttagttttacaactatttataattaaaaacaatgatgtttggaatatttccgtacatgtctttggttgttcttcaaatatctgaggggttctctgagagcccaggtttggcaaagtaaagcctacaggccgcattgggctaccaccaatttttgtagataaaattttttttattggagcactgccaagatcatttgtttatacaatgtctgtaactgctttcacacttcaacagcagagttgaatagttgtgacagataccatatgttttgcaaagccaaaagtattttctggtctttcatagaaaaggtttgctgaccctgctctagtgtactaggggaacaattgctgggtcatgaggtatgatatcttggacctcactagatattgccaaattgctttccaaggtgtttatacctgtttattcccctgaagaagtgtaggagagtatcattctttcaccttcttgccaatacttgaagtggtctgcattttatggtggtgaaattatatcttattgtggttttaattctcatttccctgattcctcataagattgagtacattattatttttgagacggagtctcgctctgttgccctgttgcccaggctggagtgcagtgcctcgatctcagctcattgcaacctctgcctcccaggttcatgcgatcctcctgcctcagcctcccaaagtagctgggattacaagcatgcaccaccaccccagctaatttttctatttttagtagagttagggtttcaccatgttggctaggctagtcttgaactcctgacctcaagtgatctgcacgccttggcctcctaaagtgctgacattataggtgtaagccaccatgcctggccatgttttctttttatgaaataccttttaatttttttgcccatgttaacactgaattgttttcttgctgatttgtagaaattctttatgtattttgtggggtttttttgttttgttgggtttttttttgagacagggtcttgctctgtcacccaggctggagtgcagcggcacgatcttggctctgcctcctagtttcaagcaatcctcctgcctcagccacttgagtagctgggattacaggcatgtgctacaatgcctgactaatttttgtgttttttgtagaaatggggtttcaccatgtttgccaagctggtctcaaactcctggcctcaagtgatccacctgcctcggcctcccaaagcgctgggattgtaggtgtgagctgccacgcctggcccaaaattctttatgtattttggatactaattctttgttacagagttagcaggtatcttccagtttttagtttgtctcttcacttcgtgatgtttattaatgaacagaagatgttaaacttatgtaattttattaatcattttcttgatatctcatgtttttaaagatgctattgtgttctcttctaagaggtatacagctctgctttcacaattaagtcctcctatcatttttgtttttgtcctttacctatgtgctgtccaattgactggagtacacatgtagccactgactacatgtagtcagtggctacatgtgggtatttaaaaaaagaaaacagatttatagaggtataattgacatacaataaatggtacacatttaaagtatactctgataatttttgacatatgcgcatgtcaagccatcatcacattcaaagcaataaacatctatcacgcccaaaagtttccttgtgaccatttgcaattatcccacattctccaatctccatttctaggtaaccactgagccgctttctgtcttgtagattattttttctataattttatatacagtcatatgttgcttaacaacagggatatgttctgagaaatgtgtcttaggtgattttgtgttggtgtgcgaatatcagagtgtactgacacaaacctagatggtatagcctactgcacacctagattgtatatagcgtgttgctcctaggctacaaacctgtatgcaggtggtatggtatcattgttaacttcctgattttgatgggatcgtagttatgtaggagactgtccttgtgtgtaggaattaaatactataaatatttaaaattgatgggatttggtggtttacacactattgcttcaagaaaaagaaaatagaattattcttgcaaaaaaggaaaggtaaagctgaagatataaaaagatcagaaacccggatacttttaggaatctaggtagcagtttcatcagggtcttgctgctggatgtgtaccagataacagtctgttttttttttcaatgacgagaataaataagaaacagcagcatttggagtcaccatttggttatgataattcactgtcattttccaagagctatcagacttttgcagtggtcaaactatgtaataggaatagatgggatttaccaccccttcttctttcatgttttagtggtggcaggaatctttgttattctttgaaggatgcgacagtgcttttaaattattagtttggagtagagtctcattgttgaggtgctccaaagtcttgcacttggccttttctaccataataggcttcctaacctatcagttaagagctttcaggagaagctattagtttttgtccagctagttgatattccattcagtctgtggaattggggaattgtgtactatgtaatactaaatagtattactgcttaaataaaccctttaaataagggctaaagtgaaagcagtgtagccttttttttttcatttggactatttcttcagaaaaaaaattctcaaaactgaattatttgcttaaacaatgtataccttttgatggttgccaataagtattttcaaattgcttccctgaaggctttacatctccatactactttggaattggaattctgtaagaactcttaagtgattgagagtatgtgccctagagttgtactgcctaggttcgaattccagcttctccacttactgagagttgacagcgtgctggcagccctcgctggctctcagcgcctcctcagccttggcgcctactctggctgcgcttgaggagcccttcagcccgccactgcactgtgggagcccctccctgggctggccgaggccggagccggctccctcagcttgtggggaggtgtggagggagaggcgcgggtgggaactggggctgcgtgctgcacttgtgggccagcgcgagttccaggtgggcatgggctccgcaggccctgcactcggagcggccagctggcgctgctggccgcaggcagtgaggggcttagcacccgggccactagctgcagagggtgcgccgggtcccccagcagtgctggcccaccggcgctgcgctggatttctcgccgggccttagctgactccccatgaggcagggcttgggacctgcagcctgccatacctgaggccccccccccgccacccccccgcctcacacagcccaagcctccccgatgagcaccaccccctgctccacggtgcccggtcccgtcgactgcccaagggctgaggagtgcgggcccaagggctgaggagtgtgggcgcaaggcccgggactggcaggcagctccacctgcggccccggtgcgggatccactgcaaagccagctgggctcctgagtctagtggggacttggagaacctttatgtctagctaagggattgtaaatacaccaatcagcactccgtatctagctcgaggtttgtaaacacgccagtcagcaccctgtgtctagctcagggtttgtggatgcaacaatcagcactctgtatctagctaatctggtggggacttggagaatctttatgtctagccaaggtattgtaaatataccagtcagcactctgtgtctagctcaaggtttgtaaatgcaccaatcagtgctctgtgtctggctaatctagtggggacttggagaacttttgtgtctatctcagggattgtaaatgcaccaatcagcaccctgtcaaaacggaccaatcagttctctgtaaaacagactaatcagctctctgtaaaatggaccaatcagcaggatgtgggtggtgccagataagggaataaaagcaggctcagccaacattggcaacacggtggggtggcttccacaccgtggaagcttagttcttttgccctttgcaataaatcttgctgctgctcactgggtccacactgtctttatgagctgtaacactcactgcgaaggtctgcagcttcactcctgaagccagggagaccaccaacccaccagaaggaacgaacaactccagacgcgcagcattaaaagctgtaacactcaccgggaaagtctgcagcttcattcctgaagccagcgagaccacgaacccaccagaaggaagaaactccgaacacatccgaacatcagaaggaacaaattctggacacactgcctttaagaactgtaacactcgtggcaagggtctgcggtttcattcttgaagtcagtgagaccaagaacccaccaattctggacacattactacctttgtaaccttcagtaaaactatttgcaccagggtatccttacctataaaatagagatgttataacaatttattggtttttgcctttatgacatgcatattttcttgcttaagaaaattttccttaggctgggtgtggtggctcacacctctaatcccaacactttgggaggctgaggtgggcagattgctcgagcccaggaattcaagaccagcctgggcaacatagtggaaccccctctgtacaaaaaatacaaaaattagctgggcgtggtggcgtgcacctgtagccagcccaggcaaacccagctgcttgggaggcccaggtgggaggatcgcttgagccgaggaggcagaggttgtggtgagccaagatcatgccactgcattgcagcccgggtgacagagtgagactctgtctgaggaaaaaatgaaaagaatacttaagtgagagttagtatactagatggtgctgtcttttaatgcacttctcgttttatgtcattaaaaaaattaaaatataaagtaggaaataaatactatagttaaggaagacaacataaaaataccagttgcttaatatataaatttagtgcagtttcaatcagaatctcaagaaggttttttaattttgcaagttgctactaaagttcctttggaaaagtatgtgggagaattttctttttacttttttttttttttttttgggtagagatagggtcttactatgttgcacagactggtcttgaactcctgggctgaagctatcccctcctgccttggcctgccaaagtgctgggattacagatgtaagccaccgcgcctgcacctccctcccccttttttaagcgacaggatctctgtgttgtccaggctggagtatagtagctattcacgggttcaatcacagtgcactatagcttctaactcctgggctcaagcatcctcctgcctcagcctcacaagtagctgggactgcaggcatgagtgactgcacccagctatgtaagattaatttttttgtttttgttttttttggaggcagagtcttgctgtcacccaggctgaagtgcaatggcatgatctcggctcactgcagcttctgcctcccaagctcaagtgattcttgagcctcagcctcctgtaactggggttatgggtgtggtggcacacaactgtaatcccagctactctggaagctgaggcacaagaattgctttaacctgggtggcggaggttgcagtgagctgagattgagccactgtactgtagcctgggcgacagagcaaggctctgtctcaaaaaaaaaaaaaaaggaaaactaaaaagaaaagaaaaaggccaggttcagtggctcatgcctgtaatcccagcactttgggaggccgaggcggcagattactgaaggtcaagagttcgagaccagcctggcgaacatggtgaaatcccgtctctactaaaaatacaaaaatattagcctggtgtggtggcacatacctataatcccagctactcgggaggctgagacaggagaatctcttgaacccaggaggcagaggttgcagtgagccaagatcacgcctctgcactccggcctgggtgacagagtgagactgtctcaaaaaaagaaaaagaattgagggatacttaaactaccaattattaaaaagtactataaatagattagtaggatgagtttagaaatagatctaaggcaaaatgtagcatataataaaggtgacatttcagatgaatagggaaagtatgaattagtcatttttaggtcattgcaaaatatctctttgttcatgttaggcttttgaccaaaagtgtgatttaaataatattgcatctaaggatatttatttttagctcgttttttcacttgccattttgttttaggtgatttttgtgaatggctgaattatttgtatactgtaggtaaattttgttttgttttctttcttttactctttaggagactgagtcttgctctgtcgcccaggctggagtgcagtggcacgattatagctcactgcagccttgaactcctgagctcaagtgatcctcctgcctcctcctctgaagaagttagaactaacagatgcatgccactaaacctggttaattaaaaaaaaaaattttttttttttttttgtagagacagaatgtggctgtgttccccaagctggtctcctggcctcaagtggtcctcctgccttggcctcccaaagcactgtgaatgtaggcatgagccactgtaccctgccaaattttgtgttttgaatgtgctgtagaacttctgagagttcgcctcatttattcattcacatttattgtagtagaagttttttttttgtttgtttgttttttaatttacttcagtttgtttaaaaagaaagaggatagccaggcacagtagcacatgcttatagtcccagctgcttgggaggctgaggcaggaggattgcctgagcccaggaggtcaaggttgtagtatgtgatgatcacacctgtgaattagcctgcactccagcctgggcaacatattgagaccctgttgttaaaaaaaaaaaaaaatagaagaaagggttttatcaaaagctagtaaacaccccaaataattgaaagggctgaagaaacatacagtatactctaggctgagcttccatgaaataacttctgcaaccagattgcaaactggatgggctatgaagctgtccttgctgtgatttctgccggcaaaattgataccttttctctgctttttttttattttaaatattgcaaaataagcatatgtatagaaaaggtcataaaacataaatgtacacttcaatgaataattataaactgaacaccatccagttaggaaagaacattgtctgcactgcagatatctgtatgtcctttctgatttcatatttctatctccccctaaaaaactaccttcctgactttcatcatgagagttctgtaatggtttacttgtttttcttaatagtttcaccacttttctctaaacatgatggttgtttttgaagaaagtcatgctctatgtgttcttttatcatgtgctgcttgtgagattcttgtgtgctttatgtagtattgtccattttcatgttgaacaacttgggctgttgcccatttgtagcccttattattgttttagagacagggtcttgctgtatttcccaggctgtaaactcctgggctcaagcgatccccctgcctcacagcctcctgagcagctggtactacaggcacatactaccatggttgactcatgtatttgttgtgtatgtatgttaatttgtggtatatacctaggaggtagtcaaagagtatacatatctttacctttaataagtaatgcctaaatgttacctgcaatgtaccagtttacactttcacagtagttgatgatagtacatgttgctccattttcttgaccacagttcggttgctattgtcgaactttaatttgtgcggtcttgtagttatgcagcactatctcattgtggttttaaattagtatttctctgataattaaagaagctgaatacctttgcatattttgtggctgtttggatttcctattttgtaaaaggcttgtttaagctttttgtccattctcccatttgggtagtctgtctcattgatttgatttgtaggaaaattttatatattctggatgcttttcctttggcgcgtaggtgtgtgtattctgttctctgtgttgtttttattctaataatggtatcttctgaagaatagatttttttagttgcttttaaaaaagatgtgcaatgtgatagatgattttatgtatgtatacattgtgaaatgattaccacagtcaagttaattaacacatccatcacctcacatagttacctttttttggtggtgagaacactcaagatttattttcagcaaatttcaagtatacaaaacagtattattaactatactctctgtgttgtacattagatactaagaacttactcataatgggaagtttgtgctgtttgaccaacatctccccacttctcctaacccctaatccctggcaaccgtccttctactctttccttctgtgactttttctttagattccacgtataagtaagatcacacagtatttgttttttctgtgtttggcatatttcacttagcataatgtcctacaggttcatccttgtgttgcacatggcaggatttcctttttttttttttatggctgaacgatattccattgtgtatacatacattttctttatttatttatctcttgctggatacttagattgttttcatatcttggatgttttgaataattctgcagggagtgttgaggtacatgtatctctctgagagactgatttcattttctttggatatacattcagaggtgcaattcctgagtcatatggtacttctatttttagatatatttttaattctataatattttccataatagctatgccaatttacatttctatcagcagtgtacaaatgttctcccttcttcacatcctggccagcacttgtttactgttatctttttgataatagccatcctaataggtgtgaggttatctctctctttatttttttaatttttttttagatgggtcttctcgctctgttgctcaggctggagtgcagtggtgtgatcactgtagccccagactccttggctcaatggaaccttctgtctcagcctcctgagtagctaggactacagatgtgtgctaccatgcccggctaatttttaaatttttagtggagatgggtctcgttatgttgtctatgctggtgataaattcctggcctcaagcgatcttcctgtctcattttgtttttgatttgaatttccgtcatgatgcttgatgttgagcttctgttcatatacttgttgcccatttgtatgacttctttgacaaatgtctattcaggtcatttgcccagtttttttttgtttttgtttgttttgttttgttttgttttgttttgttttgagacagagtctcgccctgtcgcccaggctggagtgcagtggcatgatctcggcccactgtaaactccaccccctgggttcaaactattctcctgtctcagcctccccagtggctaggattacaggcgcctgccaccatgcctggctaatttctgtatttttcgtagagacggggtttcaccgtgttagccaggctggtattgaactcctgacctcctgatccacccacttcggcctcccagagtgctgggaatacaggcatgagccaccgcgcccggcctgcccagtttttaactgtgtttttgtttgtttgtttgttttgctattgagttgtatgatttccttatatattttggatattaatatcttaccacatagtgtaaagtttgtaaatattttctcctgaaagttgccttttcattttgttgatggtttcctttcccgtgcagaagccttttagtttgatgtagcccaactgtttttttctgcttttgttgctgttttttttgtttgtttgtttgtttttttgagacagagtctcgctgtactacacaggctggagtgcagtggcgtgatctcagctcgctgcaatctctgcctcctgaggttaggatccctcctgagctgggattacaggtgtgcgctaccatgcctggctaatttttgtatttttagtagagacaggctttcaccatgttggtcaggctggtctagaactcctgacctcatggtccacccactttggctttccaaagtgctgggattacaggcatgagccactgcacccagcctgttgccatttcttttggtggtcatattaaaaaagtaattgccaagaccaacgtcgagatttttccttatgttttttttctaggagttttgtgctttttgtttttcttttcttttctttctttctttttttttgaggcagattctcgctctgttgcccaggctggagtgcagcggcacgatcttggctcactgcaacctccacctccaaggttcaagcgatttgcctgcctcagctgcctgagtagctgggattacaggcgcacaccaccacatctggctaatttttatattttcagtagagatggggtttcatcatgttggccaggttggtctcgaactcctgacctcaggtaatccacccaccttggcctcccaaagtgctgggattacatgtgtgagccaccgcatccggcctgagttatgctttcaatgtatttcttacatttcagtttttaatcactttccagttaatttttgtgtatggtataagacaagggtacaatttcattcttttgcatgtggatatccaggttttccagtgccatttattgaagactatccctacctcagagttttgtttgtttgtttgtttgtttgttgttttgagacaggatctcactctgttggccaggctggagtgcagtggcaccatctccactcactgcagcctccacctcctgggttcaagtgattctcccacctcagcctcctgagtagctgggactacaggcacacatgcctggctattttttgtatttttttttttttttttttttgagacggagtctcgctctgtcgcccaggccagactgcggactgcagtggcgcaatctcggctcactgcaagctccgcctcccgggttcacgccattctcttgcctcagcctccagagtagctgggactacgggcacctgccaccacgcccagctaattttttgtatttttagtagaaacggggtttcaccatagtcaggatggtctcgatctcctgacctcgtgatccgcccactttggcctcctaaagtgctgagattataggcgtgagccaccactcccagcgtgttaagagttatctcaaaaaaaaaaaaaaattatcggccaggcgtggtggctcacgcctgtaatcccaacactttgggaggccaaggcgggcagatcacgaggtcaggagatcgagaccatcctggctaacacagtgaaaccccgtctctactaaaaaaatacaaaaaaattagttgggtgtggtggcaggcgcctgtagtcccagctatttgggaggctgaggcagaagaatggcgtgaacctgggaggcggagcttgcagtgagccgagatcatgccactgctctccagcctggacgacagagcgagactctgtctcaaaaaaaaaaaaaaggaacactcatttactgtctttattactgatttttctttttgcttatgttggattacaagtctgcatttttattttttttcttaacataattctattcctttaaacttccaggaattcttcatctttgcctatgacctttctgtgtgtgtctatatgttgtggatttatttctaacatttacattctgtcctttcagtgggattttggtggggagaatatgtcattgtttggactcattttgccatcatgaactataagttgcagtttgtttagtgttacataatacttcagaattgttgaatgacagtgaatttaattaaacagtatagggtttgtaatttaatatacagggattctgcccctaaatatttgagttatctgaagcaggtttcttaattattcaaagtattgatatccttatctgcaaaatgaggaataagtaaataaataaagggaataatcatatctgtctcataagttcgtcacaagcattatttgagataatacatgtaaagctcttagtatagaacttggtatacagtgaatatactcagtaaatgtaatttgttaagtagtgactattcaaaatagttatttcaaaaacaaatcaagccgagtgcggtggctcatgcccatgatcccagcactttgggaggccgaagcgggtggatcacccaaggtcaggagtttgagaccagcctgaccaacatggcgaaaccccatctctactaaaaatacaaaaattagctggggatggtggcaggcgcctgtaataccagctactcgagaggctgagtcaggagaatcacttgaacccaggaggcagaggttgcactccagcctgggtgacagagtaagactcaatctaaaaaacaacaaaacagaaaaacaagtagctttttcagaaagccttttagaagagatatgagtaaacagatgctaagtggctggctaaatgataccacaactcttgaatcaaaactgattcagattaaaaaaacctcttaacacattctttcctatcaatgtagttaggactaagagtcatgtagcagtagtaaacctgtcctgtaatatatttctcttaggattggtttgatagttgtatcataattgcattatttataacattaatttattaatgtattcattaattaacctaagtcctttagtagttttcagaatatttttcttaaattgtttcctgtgctaattcgaatgttaacatgctaattcagagtttgttgccatttgtatcctgacagtgtattaatgtttatacttgcaagagtgaaatattttatttcttattacagcggaatggccaaagactatgacgggtcttcctagcacatcagggacaactgccagtgtggtcatcattcggggcatgaagatgtatgtagctcacgtaggtgactcaggggtggttcttggaattcaggatgacccgaaggatgactttgtcagagctgtggaggtgacacaggaccataagccagaacttcccaaggaaagagaacgaatcgaaggacttggtgggaggtaacattctgtcgttttctctttcctcttttggttctatttagtccttttatgctttactaatgaaattgacctactactgtcccttttactgaagttactttcttagtattacaggttttttagtttgtctgatgtaatactcatgtatgtatgttcatatttttctcattactatgaattgacttttatttctgataatgactctaataggaaataatatttcagtgagccccaaggaaacaattcaaggttttactgaaaacctttcagatgactttcagaatctagacggagcagctcttggagttccagagtagaacactttgaatctggctgggggaaaaagattaagttagaattaaccttcagcttttttcattgatttcagatttactgcaaacctttccagttattgttttctttgtttgaacttagcgtttcaatgtgtaagtaatttgtaaactaggaactgaaattgatttcaattttatatttttatgattcaaacttaaatgaaagattattctaaaaatcaagagagtgaataacatgaaaaaatttaaaaattatctcaatactaatttttaaaaattgaggatatgaggcaagttgagtagaatccaatgttttctaaataatccttctaactaaagccttcccatgatatcgttacttgcctcttttttgcttttattaaatcaaaattggtcttttgcagagaaacgacaaactaaggaaaataattagcatctggctgggcactgtggctcacacctgtaatcccagcactttgggaggctgaggcgggcacatcacctgaggtcgggagttcgagaccagcctgaccaacatggagaaaccccgtcgctactaaaaatacaaaattagctgagtgtggtggcacatgcctgtaatcccagctactccggaggctgaggcaagagaatcacttgaacctgggaggcagaggttgtggtgagctgagattgcaccattgcactccagcctgggcaacaagagcaaaacaccatctcaaaaaagaaaaaagaattagcatccttaaactataaggagttcaacaaattaataaagtactaaagtgtgaggctgggcgcagtggctcacgtctgtaatcctagcactttgggagaccgaggcgggtggattgtctgagctcaggagttcgagaccagcttggggaacatggtgaaaccccatctctgctaaaatacaaaagaaattagccgggcgtggcagcgtgcaactgtagtcccaactattcgggaggctgaggcaggagaattgcttgaacccaggaggcagaggttgcagtgagctgagattgcgccactgcactccagcctgggcgacagagcgagactccatctcttaaaaaaataaaaataaaataaaataaagtactaaggtgcatggcaaccccggttaggtggataaaggagagaaagtttgaacaacaaaaaaatgcaaaacagtagtaaacatttggtgaaataaaagtaaaacattaagatgaaacttcatttcctgttattagattaggaaagataaagagattcctctcaatatttttattgaaatggttaccttcttggtaagattacaaattggtactacctatatagaaaataatatataccagtagctttaaatgtttagggaatctaaagaagaaatctgaactgtggacaaaaatatctgaatagagttactgattgcagcatttgtaatgactgttaaaggccagaagtaacttgaaggcctaacagctggataatggttaagtatatttagcaacatattcataatgctgaatatgatacagccattaaaaataacatttatagataagtttataaaactcatggtgttttgaaatttttccaagtaaaggtagagtaatatgaactcccatgtatatggggaaggtttaatgatagaggaaaatgtttatggtcacaaaaaagcaggatataaaattatatttctggtgttagcaatgcagagacatgggaataagatggaaatattctaaatttttataaatgagtgatgagattttatgccatacgtttatttttatttttttaatggcgacattcatttggttcaaattcaggtagcataaaaaagaggatatgctatggaaggtctctcagctgctactgtcccaaaggccacctcgttcccctccacttgctaagcaaccagtatggctgtgtgtcctttcaaaagagagatattcatatacaatcaaatatattatggagctgtaccatgtacagatgtaccgtcatttattttaatcagtctcctattgaaggatttttatttctaatttttttttgttattgcaaactgctgtgaaatgaaaaatctgcacatatgtgtttttgtgcacttgccagtatatttgtaggatcatttcctaaaagtggaattgcttggccaaagaggtgtatgttttgaatattgataactatttgtctctataaaggttgtaccaatttacacttctaccatcagtgtatgtggatgtcctggacaacaaataaaactttttgatcatatccagtttcaggtttaaaaaagaggtgtctcaatgatgtgtttttttggggttttttttgttttttttttttgaaacggagtctggctctttcgcccaggctggagtgcagtggcgcgatctcggctcactgcaagctcggcctcctgggttcatgccattctcctgcctgagcctctctagtagctgggactacaggcgcctgccaccacgcccggctaattttttgtatttttagtagagatggggtttcaccatgttagccaggatggtcttgatctcctgacctcatgatccacccacctcagcctcccaaagtgctgggattacaggcgtgagccactgcacccggcaatgatgttgttttaaaaaaaaattttaagaaatagaaatgaggtcttaccatgttgcccaggctggtcttgaactcctaggctcaagcgatcctcccaccttgtcctcccaaattgttgggattacagatgtgagccacgtgcccagcttcagtaatgttttaatttgaatttatcttatgagaaatattgaatctttttatatatttaagagccatttatattttcttttctctgtatttcttttaatatttattattcattttgggggattgttgttagccatttttttcccacattaatgtgtaggggctagctgtacattaaagaaattagtctgatgtatgtgatgtgaattttagatattgtttccacagtttgtcttttgattatgctcctggaactttttccacgtggaagtttcttttaatgtagttaaatttattagtctcttctgttacaactttttgggttttatgccacacacacagtgaagctttttaataaagtctgctatattttcttttagtacaacaggaatatttttggtcttagaaactctgtttgttcattgtatttgtttttgacatgatctcactctgttgcccaggctgcagtgcagtagcacaatcatggctcactgcaacctcaaatgatcttcccatgttagtctcttgagagctgggactacaggtgcacgtgtgccaacatgccagctaattttctttttctttcttttttttttttgagacagagtcttgccctgttacccaggctggagtgcagtggcgggatctgggctcactgcaacctctgcctcccaggttcaagcgattctcctgcctcagcctcctgagtagctgggattacaggtgcccgccaccatgcccagctaatttttgtatttttagtagaaacggggtttcaccgttttggtcaggctggtcttgaactcctgaccttgtgatccgcccacctctgcctcccaaagtgctgggattacaggtgtgagccaattcgcctgaccaggaaggagtattttgctcacttttccataaatgtttgtctttgatactgtttcaaaactcaagaaatgatagtttcttaaggtatctgaaactttattaatgaactttgcatattcttacattaacagccattagtcagtcaatgaagacattagttgaatagaaatttttttttttttttgagacttgagttttgctcttattgcccaggctggagtgcagtggcacgatctcgtctcaccgcaacctctgcttcctgggttctcagcctccggagtagctgggattagaggcatgtaccaccacacccagctaattttgtatttttagtagagacggggtttcacgaactcccgacctcaggcgatccacctgccttggcctcccaaagtgctggcatttcaggtgtgagccactgctcccggccctgaattgaatgctttttaaaaatccctgcataatttaaaaaaattaatgactttaattttaagagtacttttagattcacagcaaaattaagtgggaagcacagaattctcatatatactttggcctaccccccgtctcccaggcttccccactatccttctccagagtgtttgttataatcaatcagtgaacctacactgacatactgttatcacctggtgtccatagtttacattagggttcactccgggtgttatacattttatgggttttgacaaatacgtcatgacacgtatccatcattatagtatcatgcagattagtttcatcaccgtaagagtcctctgtactttgtctgttcatccctcccccacttactcctggcaaccactgctctttttactgccttcataattttgctttttccagaatgtcatatagttggaaccatatagtatgtagcccctatgcatgactttttaatatatgcatttattgtttgtaatatactaggtcactgagttatacagatcttgcaaatattgacactttttattatactatataatatccagtcatgcagcctctcaaaaaactccactgtatacatgtggtcttagtagtattatgaaaaaaaaaaatggaccttggagacaccctgaaaaagtctgtagtaacctgccaggggcccctaaaccacattttgagaaccactttgccagtactcgtatggtttcatcatcttttatattttaatctttaatccttctggaattttaagatctaagctatgtagtaaataggcaagttaactttttttctagatggctactagtagccacttgaataattatacatcttttcattactgagtagcagggtgaccaggcttaagacccttctttagtgggaagatgaccttgaatttaccctcttcttgtatttctctggtgaagataaatgtgaaatatcacctctgttgtaagacagcattgcttattgtagaatgatccctgaatggaattgcatcttggtagggaagttgttgaatggactgtacatttctattcggaagcacaggccttggcttccttgtatgcatgcagtttgtcttgtgtagggaccaagaaactgtagtcatgtgctatttattacattggtttctgtgacacatgaagcttacctaagctagaccctgtcgtcttgcttacaactgagccatcacttgggagatggaaaaatggcttctggctgtctgaatcactgctgaagacaatatccttgaagctgctatggtggcatactctatttcctgcccagtattctgcaaagttagatgaacctcctttcaggctatagtctatttgatcttgtgattgtgaaggtgagaatatatctgacatctctgctggttgtcatgctaagtgggctttgcaaattataaacagaattcttccatatatttgggtcttttctgggctataatttttttcctgcttatttaccagtattataatttttaaaacggagactttattataattttaaatattggtaggcctgattccttctcattaatcttccttttaaaaaatacttttcttggggccgggcacagtggcttacgcttataatcccagcactttgggagcctgaggcgggcggatcaccggaggtcaggagttcgagacaagccgggccaacatggcgaaaccctatctctactaaaaatacaaaaatattatccaggcgtagtggcatgttcccgtaatcccagctactcgggaggctgagggaggagaatctcttgaacctgggaggcagaggttgcagtgagccaagatcctgcctctgcactccagcctgcccaacaagagtgaaaactgtctcaaaaaaaataaaataaaataaagcagctggctgcggcacttgtaatcctagcgctttggaggccaagatgggaggatcacttgaggttagaagtttgagaccaacctgttcaacatagcgggacctccatctctaaaaaatttttttataattataaataaataaaataaatgaacaaaaaaggaaataattattttctacagaagaaattacccttttgtgttttaaaaatacctttcttgactattctttcttgtttgtttttttacttgaattttaaaattatattttatttgattttaataatgtttttagaaagagttttttggctttattaccaaaaacaccatctggacagttgggcagatactccgctattttggagcaggtaactttttgcaaaaattgagctattttattataagttatttccttgcttccctctgtcccggcctaggcaacgggccagcattttgtttttccagccttctgttgctgctcagtcagctctctgcgtgtcaggctgttcctttttacatgccttttaatcatataggacaacaacaggaagtgcagtaaaagcatcttttataacattgctttggttttttgttactagatgttgaaacttctatgttttaaccagtatcattatttgtctttttgtttctcagaaacacagatcataatatctttgaatattaagtgtcgagagagctgctcgtctagttatgttggaagcagctactgtaaattacttaggtactaagccttaccttgtaaggagaaggtttagcaaagaataatagagctttaagatggtattaaggcagaatgttggcatcttataactcttgtgtttcatggattcttgtgaatggcaagtttagtctttactctgctgttgacttttgagagtcatcattgaagaaagcttaatacaacaaaatgaatgcctttgatattttaactcttgttatgatcaacctatttatatcagaacttatttaaactagttcttggctgggcatggtggctcacgcctgtaatcccagcatgttgggaggcccggatgggaggatggcttgagcccaggagtttaagaccagcctggcaaacatagtgagatctgttctctacaaaaaaattacatgcctttggtcccagctatttgggaagctgaggtgggagcatcacttgagcctgggaagtcaaagctgtggtgagccacgatcacaccactgcactgcagcctgggcaacagaacgacaccctgtctcaaaaccaaatgaaaactagttctcaaaagggatggtaggctgggcatggtgactcatgcctgtaagactagcactttgggaggctgaggcaggcagattacttgaggccaggagttcgagaccagcctggctaatatggttaaaccccgtctctactaaaaataaaaaaattagccgggcattgtggcgggtgcctgtaatcctagctactcaggaggctgaggctgcagtgagttaagatcacaccactgcactccagcctaggtaacagagcgagactgtctccaaaaaaaaaagggtggggggatggtgaatgagcaactttctggaatttctcttctttgttaacacccacaatgttttctggtcattctctacttgtttcagtcttcctctggactgttcagtatactcaccactagccacaaatggctgtttaaattaataaaaattaaatttaaaaaatcaattcccatttgaagtaaagctcatttcggtcatgccaggcatagtttgagagaccatctctaatgttttgattatcagtgttttttcctaaagaactaatcatatttcaggccgggcgcggtggctcacgcctgtaatcccagcactttgggaggccgaggtgggtggatcacgaggtcaggagatcgagaccatcctggctaacctggtgaaaccccgtgtctactaaaaatacaaaaaattagccaggcatggtggcaggtgcctgtagtcccagctactcatagtcccagctactcgggaggctgaggcaggagaatggcatgaacccgggaggcggagcttgcagtgagctgagatcgcaccactgcactccagcctgggtgacagagccagactctgtctcaaaaacaaaaaaaaaaacctaatcatatttccaagttttaggcatttcttttgctcctatgacacattttaggagggttttcttactcttgtaactcccaaatctatatgtctacagctgatctatttcacaaagtctagtctcaaactttgaattacagaaatacctaaatatatagtattttctgtatattgctgaaatcatattaaaactgccaacaattagctgggcatggtggcacatgcctgtattctcagctactcaggagactgaggtgggaggatcactgcagcccaggaggaagtcaagcctgcagtgaaccatgagtgcaccactgcactccagcctgggcgacagagaccctgtatcagaaaacaaaaaacaggctgggcgctgtggctcacacctgtaatcccagcactttgggagactgaagtgggaggatggcttaagcccaggaccagcccaggcaacatagtgagaccccgtctcctcaaaaaagaaaaaattaggcaggcgtggtggcccacgtggtggctcccagcactttgggaggctgaggtcaagagttcgagaccagcctggccaacatggtgaaaccctgtctctactaaaaatacaaaaattagcaggcgtggtagcgtgtgcctgtagttccagctacttgggaggctgaggcagaataatcgcttgaacccaggaggcggaagttgcagtgagtcgagatggtgccactgcactccagtctggacaacaagagcaaaactccatctcaaaataaataaataaaaataaacaaaaaaactggctgggcacggtggctgacgtcagcctgtaatcccatcactttgggaggccgaggtgggcagatcacttgaggttgggagttcaagaccagcctggccaacatgctgaaaccccatctctgctaaaaatacaaaaatagccaggcatggtagcatacgcctgtaatccaagctactcgggaggcttaggcaggagaatcgcttgaacccaggaggtggaggttgtggtgagctgagatcacaccattgtgctccagcttgggcaacagagtgagactccatctcaaaaacaacaacaacaacaaaaattaaaactgaagttctgctgtttcgcccgtcctcaacataaacactcagaaccctataacctttcctttttaattgcttatatcacaatttaatgcctatttatttatttatttattgagacaagagtctcgctctgtcatccaggctggagtacagtggtgtgattctcggctcactgcagcctctgcctcccgagttcaagcagttctctctccacttagataaggccttctgtcaacccccaattgtttactaattaggtagtgttgctttttttttgacatggtatttatacttacttttcttcacattacattcatttggttatactgcctattccagtaatctcaaaattttccactttgaatctaccctaattcctctctgaacaggaattttggcttatgcatctttgtatttgaaacacataagacattattttgtaataatgtagtcttattttattagtgatttaatatactgagctatcttagttgttgtattttaatcatttagattatttatgtgaactctttatttttagtgtaatgaacaagtctggggtgaatcgtgtagtttggaaacgacctcgactcactcacaatggacctgttagaaggagcacagttattgaccagattccttttctggcagtagcaagagcacttggtaagtaggacttaatttggtgaaattatattgaattttctacaatatatggtggcaaaataaaagaggagacagaactaaacccttacttggcatatagtgagggtagagatatcatgatattctattaactgctttagaacctaatcgaagccatgcatggtggctcacgcttataatcccagcactttgggaggctgaggtgggcggatctcttgaggtcaggagtttgagaccagcctagccaacatggtgaaactgcatcttcactaaaaaatacaaaaattagctgggcatagtgatgtgtagctgtagtcctagctactcaagaggctgagtcaggagaattgcttgaaagcaggaggcagaggttgcagtgatcgcatcactgcactccagcctgggcgacagagcaagactctaaaaaaaagcctaattgaggggaaggtttaggtatataattcactgacagttgccctttgttcatgagtcacgttcaatgttttgctaatttctatctctgtttagggaagtatatgcatatctaggcttaatgttacccttgaaactatttttaagtatcccattctcctttagcccttaatagtcctcctgagagccttcaaaacctcttttttctttagttaggaaagtaaaataactatgaaaaaaatagttatatttctggtctacctggctttggaaagaaggctagagaattacacctgttaaggtgtcttaccttggctatgctagatgggggtagttttttcaaagaaaatgtctctgagaaaacgcacatttgtttatttttattttatgagacagggtcttgttttgttattcagcctggattgcagtggcatgatgacagctcactgcaacctctacctcccaggctcaagtgatcctcccacgttagcctcccgagtaactgggactacaggtgtgagccaccacgcctggctaattttttcttttttaaggagacggggtctcactgtgttgcccggggtggtcctgggcttaagccatcctcctatctcggtctcccaaagcactgggattacaggcatgagccaccacacccagcacaactactatatatattaataatttgtttccaatgtgaaactaattttcttctttcacaccctgactggtggacttttatgttatatccaagcatttgctattatgaaaaatactgcaataaatatttccttatatacacatatgggttgttttttttttttaaatggagttttactcttgttccccaggctggagtgcagtggtgcagtctcggctcactgtaacctctgcctcctgggttcaagcgattcttctgcctcagcctcccgagtagctgggattacaggcatgcaccaccactaccggctaattttgtatttttagtagagacggggtttctctatgttggtcagactggtcttgaactcctgacctcaggtgatctgcccgccttggcctcccaaagtgctgggattacaggcgtgagccactgtgcctggcaagatttctttaagatacataactagaaatggaatttctgggtcatagtatgttacttaccaactgtttttgtgtcgtaacactcacacaagatgataatatttctacagtaagcagaggaggctacttgagactgaggtaactaacatggactctctagccactgaggacccaccctgctgcccctaggcctcactcatccaaggaataccaattgggagactcagttcagagatatctacatgtttagttttattaggtattgctaaatttcttcccaaagtgattatcccaggttattacagtcccgctgtattagttatctattgctgtgtaatcaaatactcccacacttaggagtttaaaacattttttatgtacacagttcctccggctcaggaacccggggtgacttaactggatggttctggctcagggtctcttgtgtagctgcaatcaagatgtcattaatcatcgaagccttcaatggggttggagcatctacttgtaagacagctcactgagtaacctggattggctggaggcttcagtttcttgctttgccggcctctgcatagggttgcttgatgtgtcttcatcacatggcagctggcttccttagagcaagtgatcataaaaagacattttgacttctaccttgctttcttgatcacttgctgtagggaacccagctttgtattttgttagccctgaatcactaaatcaagcccaccctcaagtatatcaaataatttgtggatgtattttaaaagcatatagttcctacttcttcatgattgttctttattcaccaaatatttattaaatacctgctatgtgctaggtactgttccaggtgctgaggattcagcagtgaatgaaacaaaaattcctgcacccatggagcttactttctaggttaggggaaaacatgataaactaaaataactaagtaggacacatactgtgttagaaatgctaccaagaaaaataaagcagggaatgctatgagggtggggcctgtataataattctaaatgggatggtcagaggagggtctcgctaagatgatatgtcagtaaagtgtaagtaaagagatgaggcagtgagacctgtgagtgtctggggccacagaatttaggcagaagtaacaaatgtaagggttctcattactcatgaatttttctcttttttttttgagatgaggtctcactctgtgccctaggctagagctcattgcagcccctaaagtcctgggctcaagtgttcccccagcctcagcttcccaagtagctggggctacaggtgcatgccatcacacccaactaatttttaaaaattttttgtagagacgtctcgctttgcccaggttggtctcaaattcctggcttcaagcgatctgcccacctcagcctcccaaagtgcatgtgcgacagcgctcagcctactcatgatttttttttttttttttttagacagaatttcgcttttattgcccaggttggcgtgcagtgatgtgatctcagctcactgcaaccttcacctcctgggttcaagcaattctgctgcctcagcctcccaagtagctgggattataggcgtgcgcccccacgcccggctaattttgtatttttagtaaagacctgtgagtgtctggggccacagaatgtaggcagaagtaacaaatgtaagggttctcattactcatgaatttttctcttttttctttttctttctttctttttttgtttttttgagatgaggtctcactctgtgccacaggggtttcaccatgttggtcaggctggtctccaactcctgacctcaagtgatctacccacttcggcctctcagagtactgggattacaggcatgagccactgtgccccgctcctactcagtatttttaactgagcagctggaaaaatggagttgccactaagtgataaagaaatgactggaacatcagtgtaaaggagaggtcggaagttcagttttggacacattaccctttcggcatgttttagacattaaggtggtgatacctatttggcttcccattataagaattgatttcaggtgttgtctagggtggagctttcaatttgggggagccagtagcatatagatagtatacaaagtcttgaggtcatgtagggattgagtgcagatagaaaaggggacaaggtctagtggctgagccctgagatactctcactgttaagactcgggggatgtgctctggtttcatttgagggttggattaaaattaaaaaaaaatctaaaagagttaggggatgtgaatggaagaacaaggtaaaacaactaacagctgtaagtcaaataggaaatttgggttagcgtaccctggaagctaagtgaagaaagtgtttccagaaagaaagtgtttcaaatactgttgtcatttaggtggagggaggattgaaaaatgaccatgggatttaggaatgtggaggtcattggtgaccttgaaaaagaaggtagcttttggtggaatagcaagaccacaaccatgattggggttattgaagaaagaactgtcttcttgagtgggaggaataaaatttgatacagcgagtttttagacagtgtttttatagaagttactttacttcaacataattttgtaaacacatacagaaatgaattaatattttgataaaagggcttataagagaaaatcgttttagtgataaaaaagcttttttcctcttgatttctcttgtcacataaatattttcttttcaaaaataatgctaccttttagattttaatatttaagctaaaaaggctttgctgtattacttttcaaaccattattctgacacttggaaaaatttttttttttttatgagatggaatctcactctgttgcccaggctggaatgcagtggcacgatctcagctcactgcaacttccgcctccccggctcaaatgattcttctgcctcagtcttccaagtagctgggattacaggtgcgtgccaccacacctggctgatttttgtatttttagtagagatgggatctcaccatgttggccaggctggtctcgaactcctgacctcagttgatccgcccacctctgcttcccaaagtgctgggattacaagcgcaagccaccgcgaccgaccggcctggaaataatatttttaaaagagccatgttattggttttctgagtttagcttgttgcatggaaatacttactggcctaaagtaaattaaatgctcatatttagcacacacccttatggtttacggccatttttcttataggtttttttgggcgggggaaggggtgggaatagatgtctccttgtcaacattggtacccaccctatagacactgatgataattacccaagtacaaatgtagcaaaggtgccctctagtggctgcctgctggaattgcattttgagtcttgcaaatcattttattcactggggagataatttttgagtatagtgtgtatgaagcactctgctgtatgtacaagcacatgatctttgccctcatggagcttgcagtctaggaaagggttgaaaggcattcatcagatgataacaaaaaactgaaaaaaaaattatttttttttgagactgagtttttttcttgtcatccaggctggagtgcattggcacaatctcggctcactgtaacctttacttcccaggttcaagcgattctcctgcctcagcttcccaagtagctgggattacaggcacccgccaccatgctcggctaagttttgtacaaaaatacaggggttttgccatgttagccaacttggtctctaactcctaacctcaggtgatctacccgcctcagccacctaaagtgctgggattacagatgagagccacagcgcctggctaaaactgaacatttttaattcttcttcttcttctttttttttttgagatggagtctcactctgtcgcccaggctggagtgcagtggcacgatctcggctcattgcagcctccgccttccgggttcaagcgattcttctgcctccatctcccaagtagctaggactacaggcgcacgccactgcacccagctactttttgtatttttagtacagacggggtttcaccatgttggccaggctggtctcgaactcctgacctcaggtgatccgcctgcctcgggttcccaaagtgttgggattacaggcgtgagccaccacacccagccaattcttaacttcttatatgtactaatgaaaacctaaaataaggatatttcacttaaccagagaggccagaaaagtgatatttgaactgagttttgaagaattactggaggttaaggaggaagaaagtgtgttttaggcatagaaaacaacattttcgaaaagttcggtgataggaagaagcatagtgatataggaactctgatgaagggcagtgtagctggaacggataaggaaataagagacttggataaaatgagaaaatactgcattttataggcagtggtaaataatcatgtttggctggatgtggtggctcacacccataattctaacactttgggaggccaaggcaggtggattgcttgagttcaaggagttcaagaccagctggacaacatggcgaaatctcccctctacaaagaattggctgggcgtggttgcacgcgcttgtagtctcagttactcaggaggctttggttgggaggattgcttgagcccaggaggctgcagtgagccaagattatgtcactgtactccagcttgggcaacagagcaagaccctgtttcagaaaaaacaaaagaattgtgtctttatcttaaaaacaattgtgaactataacagagttggaatgggaaacataaccagatttgtgtgtttttaattgtggtaatatatgcttagcatacacgtaacttaccgttgtaaagcatgtggttcattgatgttacgtacggttacactgttttgcaactgtcatccaccattcatcctagatttgtgggcttttgtttgtttgtttttgtaatttcagcttttagattcaggaagtacatgtacaggtttgttacatgggtatattgcatggtgctgaggtttggggtacgattgattccgtcatccaggtagggagcatagtacccaattgttagtttttcatgtcttcctccttctctcccttctccctctagtggtccccagtgtctattgttgccatctgtatcttcatgtgtactcaatgtttagctcccatttgcaagtgagaacatgtggtatttggctttcttttcctaaaagaaattggaaatttcttttatttagaaatttagaaatttcttttcctaagtaaattggattaatttacttaggataatggcctccagctgcatctgtgttgctgcaaaggacataatttcatttttttttttgtggctgtgtagtattctgtagtgtgtatgtaccatattttctttatgcatttcacttttgatgggcacctaagtagattccttgtctttgctattgtgaatagtgctgcaatgaacatttgagtgcatgtgtctttttgtagagcgatttattttcctttggatgtatacccactaacaggattgctagatcgaatggtagttctaagttctttgagatatctccacactgctttccacagtggctgaattaatttatattcccaccaacagtgtataagcattcccttttctctgcagctttgccagcattgtcatttattggctttttaataatagtcattctcacagggtatgagatggtatttcattgtggttttgatttgcgttctctaatgattactaatgtggagctttttatgattcttggccgtttgcatgtcttcttttgaaaagtgttgatgccttttgcccactttctaatggggttatttgtttttaacttgttgaattgtttaagttctttacagattctagatattagatctttgtcagatacatagtttgtgaatattttctccctttctgtaggttgtctgtttactctgttgatagcttcttttgctgtgcagaagctctttaattaggtcctacttgtcaatttttgtttttgttacagttgcttttgaggatttagtcacagattctttcccaaggctgatgtccatccacgattcttacagtttgaggtcttacatttaaatctttaatccattagtttgtgttttaaagagagaattttcattgagttttgagaatggattagagggggtaaacattgttggaagttctccatgggaagccactcaaaggggtgctgaaatttgataggtgtaaggaccactgagtgtcttgtggactgctggctgccaagtgccacaggagcaagcagaaaatatactggaaccagaaagcaggcctcctctcttctggtgtcccttcagcaccctctactgaggaaaaaagggaattggctgtctgccagtttccaaggcacctcctttcaggacctacagaaatgatgttctatgatcgtactttggtgtacaaacactagaccagtaataaaaacccttagttaaaggcccaattctgatccttaccagttatttgatattagatagaatcatatagactctttgaactggtaaaacaagggaaagtgtctatgagtatgaatcatctggtgagtttgttgaaaggtcagattctagggacttttactagcaaatttgaagcaacttgagcatcaaaacaaattataacaggaataagttaaaaaatattgaataaaaaagaatctgtaagtctatatagagataaaaaattgtacaggtagaagaatggatttttttttttttttttttttttacatttaaaggagtttaattgggcaatgaacgatttgtgaattgggtagccacccccgcccacagcagattcagagagactccaaagaaaatctttttttttgagatggtgtcttgctctgtcaccaggctggagtgcagtggcgcgatctcggctcactgcaacctctggctcctgggttcaagtgattctcctgcccgagcctctcgagtagctgggactacaggcgtgtgccaccatgcccagctaatttttgtatttctagtagagactgggtttcaccattttggccaggatggtctaaatctcttgacctcgtgatccaccagcctgggcctcccaaagttttgggattacaggcgtgagccactgcctccggccaggaaactcttctttaaaaaagattttcagccgggcacggtggcttatgcctgtaatcccagcactttggaaggccgaggtgggcggatcacgaggtcaggagatccagaccatcctggctaacacagtgaaacccccatctctactaaaaatacaaaaacttagccaggcatggtggcgggcgccttatagtcccacctactcgggaggctgaggcaggagaatggcgtgaacccaggaggcgagatcacgccactgcactccagcctgggcaacagagcgagactccgtctcaaaagaaaaaaaaaaaaaaaaagactttcaggcctgagcacagtgacttatgtctctaatcccagcagcctgtaatcctagcactttgggaggccgaggtgggtggatcgcttgagctcaggagttcgagatcagcctggccaatatggcgaaaccccatctgtagaaaaaaatacaaaaaaattagcctagcatggtggcacacacctgtagtcccagctacttggaaggcaggtgagagaactgcttgagcctgggaggcgcaggttgcagtgagccatgatcgcaccaatgcactccatcctgggcaatagagtaagacccagtctcaaaaaaaagaaacctttttggggttgggaaagaagagcaaaaagaaccaaaataaagtaaaataaactgtcagctaataaatgtagttagaatgtcctaattctgtcatcagtttataaccgttataataattgattcattcaggaatcatcagtagatgctaaaatatggcatattttggtacagaacaggatatttcacagagcctcaaactttcaccctacagactactcaccagttaaaaaaagaaaaaggcacctttatgctgccagtagatagcactttaaccaaatgatgaaagtcaatactgccaataataggactgactgacacactgtctctcctcatgtgatatacggagaaggacatgacatcagcaatgtagtcctgtagccaaaagtgagtttacccgttcatgaacccctgtagagcacgagaacaagaggaaacaatcagatggatccaatttaaaggtcattgtgcaatagaactcttttcttttctttttttttttttttttttttgagatggagtctcactctcgcccaggctggagtgcagtggcatgatcctggctcactgctatgtccgctttctggggtcaagcaattcttctgcctcagcctcccgagtagctgggattacaggcgcgtgccacccagctaattttgtatttttagtagagccggggtttcaccgtgttagccaggctggtctccaactgttgacctcaagtgatccacctgcctcggcctcccaaagtgctgggattacaggtgtgagccaccgtgcctggcaaaagaactatcttgaactcttcacagttgtcaataccatgaatgataaaaacaaaacaaaaccctagggaattgttttaggttaaaaatgactaaaaaatgacaaatgcaattaactttttaaaaagtttttttaaaaataaagatggggtttcactgtgttgccccggctggtctcgaactcccaggctcaagcaatcctcctgtctccacctcccaaagtgctgggattacaggcatgagccacctaacctgactgaagaatgatccttgaatggatcctggatattaaaaatgcattattgtgacaactgggaagatttgaacataaactttatattatacagtgctatagcaatatgaaattgcctgagtgtggtagaataacatcctcatgcttaggagataaatgttgaagtattactgtttggaggtgaagtgttttgagtctgtaatctaatctcagatggttcagcaaataactaaaaccagctctatccacagattccaacactatctgcataaaaaatcccagataatcttcaaaagaactactggaattaataagtggagtcagcaagttcacaggacctagatttagcatacacagtctatcatatttttatgtactaaaaatgaacaattcgtaataaaatttaaataagtatcatttataatcgcacccaagaaaaccatgaaatacttaggtataattgtaacaaactgtgtttaagatttatatgcgtgaaactacaaaatgatgaaagaaatcaaagaaatagaaatataccacatatcttagtcaaaacccagagtttaaaaatttaagttagaagaaacaatcccttcttctgaaaatgtattgaggtttattgagaaagaaatagagattgaggctgggcgtggtgtctaacgcctgtaatcctagcactttgggaagcctaggtgtacagatcacctgaggtcaggagttccagaccagcctagccaacatgatgaaacctcgtctctactaaaaatacaaaaattagccagatgtggtggcgggcacctgtaatcccagctactcgggaggctgaggcaggagaatcacttgaacccaggaggcagaggttgcagtgagccaagatcgtgccattgcactccagcctgggcaacaagagcgaaactccatctcaaaaaaaagaaaaagatattggagactagtgatttggaagttgtcagtaaaagagttggaaacttgaaaggatggtttcaccaaagcaatgtaaaatatatatgtgtgtgtgtgtgtgtgtgtgtgtgtgtgtgtgtgtatgtgtatatatatatgtgtatatatatgtatatatatatgtgtatatatatgtatatatatgtgtgtgtatatatatgtatatatatatgtgtgtatatatatgtatatatatgtgtgtatatatatatgtatatgtatatgtgtgtgtgtgtatatatatatatacacacacacacatatacatatacatatgtaggtaggtagataggtatctccagaaagataagaacataagaataatagtccttacagggaaaactggaagggcagtggtgagaagggagaattttcactgtatatgtacccttttatatcttttggttttcatactatgcgaatatattacataatattataaaaaggcagacccagtaccgtggctcatacttgtaatcccagcactttggggaaccgaggtgggaggattgcttgaatccaggacttggagaccagcctggacaacatagtgggaccgccatctctacaaaaaataaattagctgggcctgttggtatacacctatagtcccatctacttgagaggttgacgtaggaggatcacttgagcccaggagatctatcctgcagtgagccatgattgtgccactgtccccatgttcatttttattatttcgtcaaccagggagctttgttttgctggtataaagaggtaagtgtgtctttgtgagcttatctggattataattagcttttagtgcttgcatgtattctgttttgctgctcagagggctgaattgctttttgaagagtctggttagcaatgattttgctactttcaagtgggagtaattgacttgaattattctttctttggactctgagcatgtttgaattgccagtatttctgatggggagctagtggggaagtttaaataaagaaaaggacaaagcttcctcttgtttaacaaaaaaaccagacctactgaaaggggacaaaaattgtttaacctcttgtctgaaaatcttttgcttttaatttaggcctttcccttaaatagttcacaataaacaaaagaggcagaaattaatgttttctcctttctgtctcctcttccacatttattggaaacagaagaaaaatttatattgtttcatttatgttgtcttatatattacagaaaagtagatggtttctataaatcatttttattttcttctgttttagttttattgatcttttttatggcctgggtcgactaaaagttattgtctcttgaacattttgatgtttgtatctaataggtctaaaggcagaagtttaggcattgtttttatgtggagctaatcaaggagaaggataaatgtaagagctttctttttccggctcagtgaaagggagaactgttgctctccaaagtttggtcatatggttggtaaagagcattacaatgctcatttttatattttgaattttcttgcaagtgactggtacttgttctgtaagttttgatgtaggtactttactgatctagagattaacaggaagtttgcaaacagccattggtacttctgtttgtaggataagttctcatcttgtcctttttcttcaaaattatcttgattaatcttggccctttgcgcttagcctgtcaaattctacaacaatccttttgggattttggttagaattacattgactttgtagattattttgggaataattgacatctttattatagtaagtattgctatctatgaatctgattggttacttcatttatttagattatctttttaatgtttcaaaatagaatctataatcttcataacaggcatgtataccgtttgttaaagttgttcctaagttccttacatttggttcattgttaaaattggattatttaaacatttatattttctatgtcttgctatcatatagaaatacgttgacttatatattgggtttgtatttaacaactttgctaaacttttctattgtaataatttatttttggttttccatgtataaatgaaattatctgcaaataatattagtattattttctcctttccattttgtatatactttatttttattatcttactgtgctgggaaggactcagtatagtattagaagagaagcaatgatacaaggcatagttttcttatttctacattttaaagggaatacttttaacattttacctttaagatgattattacagaattctggtggatatactttatcaggttaagggagttcccttttattcttagtttgctaggaaatcttatcatgagaggagtttgaatgttatcaaatgcttttctgcgtctattgagatgaactgtgtagattttctcttttaatctgttgctgttgtactattagcttccaactaatacttcttgctttttctgctcccttcccccaggtgatttgtggagctatgatttcttcagtggtgaatttgtggtgtcacctgaaccagacacaagtgtccacactcttgaccctcagaagcacaagtatattatattggggagtgatggactttggaatatgattccaccacaagatgccatctcaatgtgccaggaccaagaggagaaaaaatacctgatggtgagatgtgattgaataacttgatattgttgtctaaacattgttttggtacttctgtcagaatcttgaatatgaactaaggacattgaccttgggtagatttttgcatttgccttgatctgctagtgggtaaaacataggctttgtagctcctaatcattagaggaatgagacaagaaatatataaccgaagtctaataacaaaacacacaaccactgacttcagtataaattggcctgtgaaacgttgctaattccttatttttttaaatgacatataatttccataccataaaatttatcgttttttttttttttttgagacggagtcttgctctgtcacccaggctggagtgcagtggcacaatctcggctcactgcaagctccgcctcctgagttcacgccgttctcctgcctcagcctcctgagtagctgggactacaggcgcctgccatcacacgcggctaatttttgtatttttagtagaggtggggtttcaccttgttagccaggatggtctcgatctgacctcgtgatccgcctgccttggcctcccaaagtgctgggattacaggcgtgagccactgcgcccggccaaaatttatccttttaaagtgtataattcagtgattcttagtgtagttcacaaagttgtacaaccatcaccactactactttttttttttttttttctgactgtctcagtgtctcgctctgttaccgaggctggagtgcagtggcatgatctcagctcactctaacctctgcctcctggattcaagcgattctcccacctcagcctcccgagtagctgggattacaggtgtgtgccaccccacccagctaattttttgtatttttagtagagatggggtttcatcatgttggccaggcagggctcgaactcctgacctgaggtgatgcctcagccccacaaagtgctgggatttaaggcatgagccaccgcacccggcctccatcaccactacttctactactttttttgtttttttttccccccaagagatgaggtgtcactatgttgcccaggctggtttagaactcctaggcttaagcagtcctctcacctcagcctcctgagcagctgggactactgtggtgccatgcccagctcctaatctcaaaacattttcatcatcatcccctaacagagcacatggaagtatctggaatcaaaaatccaaagatgggttatccttagaaaagatgatctttctctcagatggcaggaatagtaaagctgtattttgaggtggaaggaggggcaaattgattgaatttttgttaaattgcctccattcattccgggcgcagtagctcacgcctgtaattccagcactttgggaggctgaggcgggtggatcacccaaggtcaggagttaagagaccagcctggccaacatgatgaaaccccacctctactaaaaatacaaaattagctgggtgtggtggcactcgcctatagtcccagctacttaggaggctgaggcaggagaatctcttgaacccaggaggcagaggtcgcagtgagccaagatcatgccattgcactccagcctgggcaataagaacgaaactctgtctcaaaaaaaaaaattgcctccattcattcactcaattaacatactaggtactaggtacagggattgcaaaggtaaatagaatatggtccttcctcagcacttaccatattattataaatagaatatataaaaaactaacaatcccattagatcatgagttcttttaaggtgagagtcatcttgattcagttttacatgttcagggcctggtgtgttgcatttagttggagattatcatgtatcaaagagtaacataaagactcttctgtctaatggatttagaattctttaatgatctgagagagatcatttcaatggcataaagacaaaaaccagtttgtagtgcattggaagaacctatttatgaaccataaagtgttttaagatgagtattgaaggaagcatccgtataatgtataattagaacaagtcttatgagacctggaagagtgagacgatagaaaacttcacaagactgcataggaagcttcatggaagagagtgatatttgagcaagaaaatttgcaggcttaatctaaggcagcagtggtttttggaaaaaacacaaagaaatacatgtaggccgggcgcagtggctcaagcctgtaatcccagcactttgggaggccaaggcaggtggatcacttgaggtcaggagttcgagaccggcctggccaacatggtgaaaccccatctctactaaaaatacaaaaatcagccagacgtggtgactcgcacctgtaatcccagttactcaggaggctgatgcaggagaattgcttgaacccaggaggcagaggttgcagtgagctgagatcgtgccactgcactccagcctggtgacagagcgagactccatctcaaaacaacaacaacaacaacaacaacaaaaaacacaaatacataagtagtagaattgacagctcttatgtttataaggaggaagaatatgatgacacctaaatttctaactctggtgactagtaagctgttataaagaagagacattatttagggagagatgggggaggtaattagttcagacataggcatgttgagttgaggtacctgtggttcatctagatagatatcttcagtaggcagttataaatatttgagagagaggggtggcatgctcctatagtcccagctactcaggaggctgtgggaggattgcttaaccccaggagttcaaggctgtagggctctatgattgtacttgttaatagccactgcactccagcctggacaacatagtgagaccctcatctctttaaaaataaaaacttgggagggaagcgtggaaatactaatttaacagttaacaagagttgcgtaaattgtggcaatatatgcacttagagagactctgtggtttaagagcacacaatattagggggactcaagtcagcagaattctagtgagctgagggaaaaatatacaggtaagatagtggaaaatggtttatataattgttttcatagagcattgatgggaagggaaacaggcacactgaaaaagtgagaggtaagggctcagtcagctggtgtttggagagtggaaccacatgccgtagggaatgtgatagattcatgaattagagattaatgctgcctttaatcaattctgaggtgcatattttcttttaatatctctgaaattggaatactttttacaaatggtatatcacagttcaattaacagtgtttttggtttttttttttttttgagatgtaatctcgctgtgttgccaggctggagtgcagtggcgcgatctcagctcactgcaacctctgcctcccaggttcaagcgattcccctgcctcagcctcccgagtagctgggactacaggcgcgcgccaccatgcctggctaattttttttattttagtagagacggggtttcaccacattggccaggatgatctccatctcctgacctcatgatccacccacctcggcctcccaaagtgctgggattacaggtgtgaaccaccatgccaagccaccacgcccagccgacagtgttttttatttcgtttgtggcacataaaatgatgcatccataacacaaggctcatggtattctacatgaagaaaacaatctaagtgatccagtcagagttacaaaaaagaatatcatagtaaaacccctcaaagtaggaggttgaaaataatagagcagaaattaattatttagggagattcacaaaacccagaagggcagtcttttaagaagacacataaggcatgattgattgtttctagttcaagagaaaagcacaaaaaagtttgagtggacataactacacttaaaaatagagatttttaaaacacactttaaaaaattcgaagtatactatacatatgacatttactatttgtactatttgaaattgtacaattcaatagtaaaaaatccatttatattctttttttccacccttcatctctctctccctactacccttcctggcttcttgtaaccacaattctactctctctctttgtgagatctactcttttagctgccacatatgagtgagatcatgtctttctgtgcttggattatttcatttagcataatgtcctccagttccatccctgttgctgcaaatgacaagatttcattcttttctatggccgaatactatttcattgtgtatgtgtatatacaccacattttctttatccattcatgtattaaatggaattgacgtaggatgattccatatttggactgttgtgaatagtgctgcaataaacatgggagtgcagatataccttcagtgtattgattttctttctgttggatatatgtatagtagtggaattgttggatcatatggtagtttacttctgtttttttttttttttttttttttttgaggaaccttcatactgttcttcgtagtggctgctctaatttacattcccactaacactgagggttcccctttctgcacatcctcaccagcatctgtagttgcctatctttttgatgcaagtggttttaactggagtgagatgatacctcattgtggttttgatttgcatttctctgatgattagtgatgttgagcattttttcatatatctgttaatcatttgtatgtcttttgagaaatgtgtattttagatcttttgcccattttaaaattggattatttggggcttgttttgttttgttgctactgatttgagctccttacatgttgttaattccttgtcagatggatagtttgcagatgttttatcccattctgtgggttctctcttcactttgttgattgtttcctttgcattttagcttgtattttcatttgtctatttttgctttggttgccagtgcttttgaggtctcatgcaaaaattatttgcccagaacagtgtcctggagcgtttctccaatgttgttttcttctagtagtttcatagtttgtgagatcaaagtagatctcacagagggaatagaattgtggttaccaattctactaattgagatcttagatttaagtcattaatccattttgatttgatttttgtgtgtgatgagagataggggtatagtttcattcttcagcatatagttatccagttttccccctaccatttattgttgctcttggcacctttgttgaagatgagctggctgcaaattgcgtggatttatacataggttttctgttctgttccattggtctatgtgtctgtttttgtagcagtaccatgctattttggttactgtagccctctagtatagttttgaagtcaggtagtgtgatgcctccagctttgttcttttggcttagaattgctttggctattcaggatattttgtggtttcatatgaattctgagcttaaagaaaaaattatgtgaagaatgtcatttcaattttgatagggattgaatctttaaattgctttgggtagtattgtcatgttaacaatattaatccatccaatccataagcatggactacctttgtatctttttgtgtcctcttcaatttctttcatcagtattttctagttttcctttatagatctttcacatctttggttaaattgattactaggcattttataatttgtgtacctattggaaataggattgctttcttgatttctttttcagattgtttgctgttggtatatgtaaatgctgctgatttttgtatgttcatcttgtatcctgcagtttcactgaatttatcagctctaacagttttttggtggcgtctttaggtttttgtaggtatgagatcatgttacctgcaaacaaggctcatttgacttattcgtttccagtttggttaccctttatttctttctcttgcctaattgctctggccgggacttccagtattgtattgaataacagtaagtgagagtggggcatccttgtctgtttcagtccttagaggaaagaccttcaatttttttccccattcagtattgatgttggctgtgagtttgtcattttgaggtatatttctactatacttatttttgttgggtttttatcataaagtgatgttcaattttacgaaatgctttttcagtgtctattgaaataatatgctttttttttttgagagagagagtctcactctgtcacccaggctgggagcacagtggtgcgatcccggctcactgcagcctccacctcctgggctgaactgattctcccacctcagcctcccaagcagctgaggtgggaggatcacttgagcccaggaggtggagactgcagtaagccgaggtcacaccactgcattccagcctgggtgacagagtgagaccctgtctcaaaaaacaacaaacaaaattttccactcattttcattagtcatttatttctatgggtacttttaatacatgcaggcagccgggcacggcggttcacacctgtaattccagaactttgggaggccgaggcaggcagatcacctaagattaggagttcaagaccagcctggccaacgtggtgaaaccccgtctctactaaaaatacaaaaaaaaaatttagctgggcatggtggcaggtgcctgtaatcccagctacttgggaggctgaggcaggagaatcacttgaacctgggaggcggaagttgcagtgagccgaggtcttgccattgcactccagcctgggcgacaagagcaaaactccatctcaaaaaaaaaaaaaagaaagaaaagaaaagaaagaaaaaaatacatgtaggcttatttcctggagtacatcattttcacttttgttctgtgaaacctagcagattttaaattcatatatgacactggaagttttattccaagccacatttatttgcataaaatgagatccttttggttttgttttctttactcgttcaattggtatatatttgttctttatactataagcagttattgtattactttttcctcatatgagtgacattgactgtttatatatatatatgagctgtttatatttccttttctctggattttgtttatattctttgacaatttttatgttgagtcattttcttcgatttgcagaatctcttatgttagaaggaatttgaccctttgcaatgatttttttttgtaccatgcctgattgtcttgtttgtgaattatgttttcttaaataacttgatgtttacttcttgttgttgttgttgttttgagacggagtctcgctctgtcgcccaggcgggagtgcagtggcgtgatctcggctcactgtaacctccgcctcccaggttcaagcaattctcctgtctcagcctcccaagtagctgggattacaggcacacaccaccatgcctgactaatttttgtatttttagcagagatggggtttcgccatgttggtcaggctggccttgaattcctgaccttgcagtccacctgcctccacctcccaaagtactgggattaaaggcgtgagccaccacacctggctactttctttttaagtaacttctttataactttttcttttctttttttctttttctttctttcttttttttttttaaatggagtcttgctctgttgcctaggctggaatgtggtggcctgatcttggctcactgcaacctccgcctcctgggttcaagcgattctcctgcctcagcctcctgagtagctgggactacaggcatgtgccgtcgcgcccggctaattttttgtttttttagtagagatagggtttcaccatgttagcgaggatggtctcgatctcctgacctcatgatccacccgcctcctcctcccaaagtgctgggattacaggcatgagccattgcgtctggacaactttttctaaataaagttacagtgaaggctgagtttcttgataaaaataaaaatagtgaaatttaatgacaggataaaaccttgttttattagtattttttgaatttagaaaagtattattttaacatggctaaggagactggggataatgtttgaaaatttgggagctttggctgggcgcagtggctcacacctgtaatcccagcactttgggaggcagaggcgtgtggatcgaggtcaggagatcaagaccatcctggctaacatggtgaaatcccgtctctactaaaaatacaaaaaattagccggccatggtggcgggcgcctgtagtcctagctactcgggaggctgaggcagaagaatggcatgaacccgggaggcagagcttgcagtgacccgagattgcatctctgcacttcagcctgggtgacagaggaagactctgtctcaaaaaaaaaaaaagagaaaagaaaaaaaaaaattgggagctttgtttgggccacagcgaacaccaaatatttaatttgatatagatacagatgtagtggcagctaaatctgagttactttccttctccttgttcttttgaatacagggtgagcatggacaatcttgtgccaaaatgcttgtgaatcgagcattgggccgctggaggcagcgtatgctccgagcagataacactagtgccatagtaatctgcatctctccagaagtggacaatcagggaaactttaccaatgaagatgagttatacctgaacctgactgacagcccttcctataatagtcaagaaacctgtgtgatgactccttccccatgttctacaccaccagtcaaggtatatagttccatagtttttaagttatgttttaatagacaccagttctttggttagcgtcacctggaaacaatttttaaattcttacaggattttggatttgaactcgattcaagaaagtgatgtaacttattatcagagagccatctttacatcaatactaatctgaatgccagccatgtgtacagcactaataaaaaggtgattgtgggcccttaagaatattattgtttgccatctaatgctatgaacattatttttaaagcatttagaagtttgtgaagcacttaaatatattttatttgaatctcgtagcccagaagtagagctaatgttattatttcattttatcagtaataagcctgagagattaaactgtctaaacaaggtcatagagaatcaaaattgagctggacctgaggatagcagacgttacaactggttgtctgttaactcgtataagaaactttattcctatttcttatccatgttaatattgattgagtttaagatatgctttgaaataagcaaattttaagtagatatcatacttttttgatttactaagaactcaaatacttggttgtgttttcatcctaatttttcccaccaaaaattagcagtattgattgataattgctttaatacatagcatggctaacctggctttctgagaatgtgttttcagtagactgaccattaaaatgggaaatgtagggaaatctaatgtcacctattcaggaagttttttaaagtgtcaaaggcctttaattttgggcgtcgtaatcctatagtcaatacttggaaatggattattactgctttgctttctttcactttacatacatatggcaaaaaccacatatggccagatacaatggaatgttttcatttctttttcttttttttgtttttgagacagagtttcactcttgttgcccaggctagagtgcaatggcattatcttggctcactgcaacctctacctcccaggttcaggtgattctcctgcctcagcctcccaagtagctgggattacaggtgcccgccactacgccctgctaattttttgtatttttagtagagatggggtttcaccatgttgtccaagctggtcttgaactcctgacctcaggtgatccacccgcatcggcctcccaaagtgctggtattataggcctggctgaaatgaagtattttcattcacaaaaggtttcttttctttgaaaaccatgaatggtaatgcaggttgaaaccctttaaagcctctttattctcttttcaaagctgtgaaagagcttatgtttgtatatttgcgtatttctgaatatttgtatgtaattattactttcatgttcccttataactgacctttaggcagtatagagaaggaggagacattagggtggggaatagtgtgaggaacaaaagggcattcttaatattgacctcaaataaaaattattgcagtctgctgactggcattagtaaacccatacataaaatacgtttaaaaaattacttaagctgggcacagtggctcatgcctgtaatcccagcactttgggaggctgagttgggcagataacctgaggtcaggagtttgagaccagactgaccaacatggagataccccatctctactaaaaatacaaaattagccaggtgtggtgatgcatgcctgtaatcccaggtacttgggaggctgaggcaggagaatcgcttgaacccaggaggcggaggttgcggtgagccaagatcgtgccattgtgctccagcctgggcaacaacagcaaaaccccatctcaaaaaaaaaaaaaaaaaaattccttaaattctgggctgggcgtggtggctcacgcctgtaatcccagcactttgggaggcagaggcacatggatcatgaggtcaggagatcgagactatcttagccaacatggtgaaaccccatctctactaaaatacaaaaaattagctggatgtggtggctcgtgcctgtaatcccagctacttgggaggcagaggcgggaatcgcttgaacccgggaggtagaggttgcagtgagctgagatcgcgttgcagcactccagcctgctgacagggcaagactccatctcaaataataataataataataattctgataatgacctaataatactactaaagtaaagataagaagacgtatgtttgccatatgcaggtatagttatttgttaacccattggccctgcccaaatatgggaaaatatttaggttaattcagaataattagtattgttggctctgatctaacaactaacaaaagacagatttctgcccaagaaattgtttttggtttgttttatttaccttaattgacataaaggtgagtactcctgactatatttaatttacatcattattaaagttgtctcatgtttagtaacatagagataaatttaattataatgtggttaatgttgaacagtcagagacttaatcacatttagacaaggcatttgagactagatttgtctgtaaacatgtcagcttccatttgaattctcacataaattagtctttgttttgggatggagatagtggaaaagcctttgtttaagtaagatagattactatgacacacatttctttctctgtcctttgtttagggcaaaactaaatttagctatgttttacaagctaagatctttaagaacggaatggggaagagagcaaagagtttcagaaaattaaaacttagttttagttgcattttaggcacagtttgtaattaattgtttaatattggattacagggtagatgggaggagaaagttgatctctgaagcagtgaacttttttaaagtatgtatttttaggggtaacctcaatatcacataactgttttacgaacatgcaggccttagcaatacaaattaacctggggtacatctaagaagtctaaacagttgcctgtgctaacagatacaatgtattcccacagaatgccaataaaaagagaattcccttcagaaatgttcaagaagaaagtaggggaagggaagccagcacacctgtggtgtcagaataatattctgtgcatttaggctgggtgtggtggctcacgcctgtaatcccagcactttgggaggccgaggcgggtggatcacaaggtcaggagttcgaggccaatatggtgaaaccctgtttctactaaaaatacaaaaattagctgggtgtggtgacatgtgcctgtaatcccagcactttgggaggccgaggcaggctgatcacccgaggtcaggagtttgagaccagcctggccaacatggtgaaatcctgtctttactaagaatacaaaagttagctgggtgtggtggtgggtgcctgtgatcccagctacttgggaggctgaggcaggagaatcgcttgaacccaggaggcggaggttgcattgagccaagactgtgccattgcactccagcctgggcaacaagaatgaaactctgtctcaaaaagaaacaaaaacaaaaaaacagagaagtgatgtatttggggcagtaccagattagtaactagaaattctttgtccttttcttcagtgtccattggtcctaaagtctatatatatatgtgtttttcagtaaagcatattcatatctatgattagatcgagatcattttagaaacgagtttctgggccgggtgtggtgggtcacttaaggtcaggaatttgagaccagcctggccaacatggtgaaaccccatctctactgaaaatacaaaaattagctgggcatggtggtgagcacctctaaccccagctactcgggagggtgaggtgggagaatcgcttgaacccgggaggcagaggttgcagtgaacagagatcgcgccactgcactccagcctgggtgacagagcaagactcggcctcaaaaaaagaaaaaaggaagcttctggatgccttcaatttccctttcattttattttttgaacctccctgcctcccttatttccctttgtttttaactctagacaaattaaaggaaacattcctatgataagtatacttttatatagcacttctaagaaagttgtatattcaggctgggcgcagtggctcacgcctgttatcacagcactttgagaggccgaggcggacagatcacctgaggtcaggagatcgagaccagcctgaccaacatggagaaaccctgtctctactaaaaatacaaaaaaaaaattagctgggcatggtggcgcatgcctgtagtcctagctactcaggaggctgaggcaggagaatcccttgaacctgggaggcagaggttgtggtgaaccaagattgtgccattgcactccagcctgggcaacaagagcgaaactccatctcaaaaaaaaaaaaaaaaaaaaaggaaaggtgtttatttataggagattttatttcggagaaagatcagataaatacgtcttcatttgctgctctgcttgggcttttcagaatctattaatattttgatacatttgattgagagtccacttgaggaaaattttacatgtttgggggagagagtatttatgctttaactctggaccttgataaagtattaagacaatgattttatgaaatgttattactttggaagagctgggtttgatagtaagaatgttcttatctggaggtgagcggctattctgagtatatgtagatttagagcactacactcaaagtagtggtgcatatctagattgacatgaagcgttgtgaaaacagcatttttaaaaacaataaagtgccttggataattctcatttgttttcatcaattgggaatttccctaaccattctcagaatggtcccatgtgtactacttttctcaaatcacagagcagtatctagtgtttgcaggatgggtgcaaagcagcattcttctgagtttccattatgaccattatgacatagttgctttaatgttgtactttgctttaatgatgtgctttaatgttgtaatgctttccacactacatactcagaaattagaatttaggagataggataaaccaaaaaactacaaatttgttgcttatcctactgagatgctaccatcccctccagtggttacactggttttcattactagaaaattcagatttttatttttaattttaatatttatttatttattgtgagacggagtctcactccgtcacccaggctggagtgcagtggtgcgatctctgctctctgcagcctccacctcctgggctcaagcagttctcctgtctcagcctccagagtagctgggattacaggtgcacaccaccatgcctggctaatttttgtatttttagtagagacgcagtttcaccatgttggccaggctggttttgaactcctgacctcaaatgatctgcccgcctcgacctcccaaagtgctgggattacaggggttagccagtgtgcccggccaaaaattgagatctttaaaagcttttttttcttttttgaaatagggaacgcttcatgaatttgtgtcatctttgcacaggggccatgctaatcttctttgtatcattccaattttagtatatgtgctgctgtagtaagcacttaatggcatcttaaagcaattttttgatggttcttatggaaaaatatgacttttatgaaaaatagagcgatttcatcagcattatgttattaccaaaagtaaattaaaatgcacacagagaatgcgatacttttgatcttctccatgtttgagtacagaatagtggaagagtgaatgtgtgcctatggttaattttgagggtttgttttgaaatcttgttccttaatgtatcttatttttgtttacctgccaatggatagaaaatgcttgtgaccacgtgaattttcacccacttgaatagattactttataatttcatctattaccctgaagacagaattcaatgtcattcttacctttatattgtcttctcactcaggttcctcccattaaaccttaacacatagttcagtaaatagaaggtgaacgaattagtgaatgcataccccgtttttgccatcctactagcttcataagaagcctaatatcacatgcatagatttgttgagttctgggataaattttttcttatttgttttaccttcttatttttcagtcactggaggaggatccatggccaagggtgaattctaaggaccatatacctgccctggttcgtagcaatgccttctcagagaattttttagaggtttcagctgagatagctcgagagaatgtccaaggtgtagtcataccctcaaaagatccagaaccacttgaagaaaattgcgctaaagccctgactttaaggatacatgattctttgaataatagccttccaattggccttgtgcctactaattcaacaaacactgtcatggaccaaaaaaatttgaagatgtcaactcctggccaaatgaaagcccaagaaattgaaagaacccctccaacaaactttaaaaggacattagaagagtccaattctggccccctgatgaagaagcatagacgaaatggcttaagtcgaagtagtggtgctcagcctgcaagtctccccacaacctcacagcgaaagaactctgttaaactcaccatgcgacgcagacttaggggccagaagaaaattggaaatcctttacttcatcaacacaggaaaactgtttgtgtttgctgaaatgcatctgggaaatgaggtttttccaaacttaggatataagagggctttttaaatttggtgccgatgttgaactttttttaaggggagaaaattaaaagaaatatacagtttgactttttggaattcagcagttttatcctggccttgtacttgcttgtattgtaaatgtggattttgtagatgttagggtataagttgctgtaaaatttgtgtaaatttgtatccacacaaattcagtctctgaatacacagtattcagagtctctgatacacagtaattgtgacaatagggctaaatgtttaaagaaatcaaaagaatctattagattttagaaaaacatttaaactttttaaaatacttattaaaaaatttgtataagccacttgtcttgaaaactgtgcaactttttaaagtaaattattaagcagactggaaaagtgatgtattttcatagtgacctgtgtttcacttaatgtttcttagagccaagtgtcttttaaacattattttttatttctgatttcataattcagaactaaatttttcatagaagtgttgagccatgctacagttagtcttgtcccaattaaaatactatgcagtatctcttacatcagtagcatttttctaaaaccttagtcatcagatatgcttactaaatcttcagcatagaaggaagtgtgtttgcctaaaacaatctaaaacaattcccttctttttcatcccagaccaatggcattattaggtcttaaagtagttactcccttctcgtgtttgcttaaaatatgtgaagttttccttgctatttcaataacagatggtgctgctaattcccaacatttcttaaattattttatatcatacagttttcattgattatatgggtatatattcatctaataaatcagtgaactgttcctcatgttgctgaatttgtagttgttggtttattttaatggtatgtacaagttgagtatcccttatccaaaatgcttgggaccagaagtgtttcagattttttaaaattttggaatatttgctttatactgagcttttgagtgttcccaatctgaaattcaaaatgctctaatgagcatttcctttgagcatcatgcctgctctgaaaaagtttctgattctggagcattttggattttggattttcagattagggatgcttaacctggattaacattctgttgtgccatgatcatgctttacagtgagtgtattttatttatttattattttgtttgtttgtttgagatggagtctcactctgtcatccaggctagagtgcagtggcgtgatctcggctgactgcaacctctgcctcccgggttcaagtgattctcctgcctcaatctctctccccagaagctgggattacaggtgtgtgccaccacacccggctaatttttttttttttttttgagatggagtctagctctgtcatccaggctggagtgcagtggtgtgatctcggctccctgcaacctctgccttctgggttcctgcgattctcctgcctcagcctcctgagtagctgagattacaggcacgcgccactgtgcccagccaatttttgtatttttagtagagatggggtttcacatgtcagtcatgctggtcttgatctcctgacctcgtgatccacccgcctcgacctcccaaagtactgggattacaggcgtgagccaccgcatccggcctgagttttatgctttcaatgtatttcttacatttcagttcaagtgattttcatgtctcagcctcctgagtagctggaactacaggtgcgtgccaccatgcctggctaagttttgtatttttagtagagatgggttttcatcatgttggccaagatggtcttgatctcttgacctcatgatccaccagcctaggcctcccaaagtgctgggattacaggtgtgagccaccgtgcccagccaactatgccattatttaaccatgtccacacattctggttattttcaatattttgcagaagataattcttgatcggtgtgtcttatgccacaaggattaaaatatgtattcattgctacaaaacaatatctcgaaatttagcagtttaaaacaacaaatattatctccagtttctgagcctcagaaatctgagagtggtttagctgggtgatagtctcgtggttttggtcaagctaccaaccagggctacaatctttcgaaggtgtcattggggctagaagatctgcttcccgcaagactcacagctgttggcaggagacctcagtttgttgccacatgttcccctccagagggcctctcacaacatggcagttatttgtccccagagcaagcaacaccggagggcaaggaagaagccatgatgttttttgtaacctagcctctgaaagtgtcataccaattctgtattttgttggtcacacagaccaagtcaactacaacgtgggagactcctacacaaggcatgaattctaggaggtgggcatttttaagtgtcatctggaaggaggctgtcacaacctggaagttaaaagcattgatattctgaaatacagcgtgtataacattgttttagtagggtgtgcaatagttatgttttggtaatagcattaatgaacaatgttattttcatcttccagacatctggaagattgctctagtggagtaaaacatcttaatgtattttgtccctaaataaactatctcactaacaaagttgagaataattttttttttttttaacagggtctcactgtccccaggctgatgtggagtgcagtggcaaaatcataggtcactgtaacctttaactcctgggttcaagtgatcctcccatctcagcttcctgagtagctgggactacaggtgcatatcaccacacctggtggattttaaaaatttccttagagacaaggtctcactgtgttgctcaggctggtcttaaattcctggcctcaagtgatcctcctgcctcggcctcccaaagtgctaggcaaattttaatcttagagacaaaatatttaggcagtattagtggttgcattagggattacaatgtacatacacttatagactacttagaatcaatgttctatgactaaaagtggaatgtaggaacgttactagccaggtgtggtggcatgtgcctgtagtcccagctactctggagtctgaggtaggaggatcacttgggcccagggggttgaggcttcagtgagccgtgatcacaccactgcacaccagcctgggcaacagagtgagacactgcctcaaaaataaataataaaagtaacaaaagttttagcaaaaggaaaaaaagttaaaagaaagcaagctgggtatggtggtgcattcctgtagtcctagctactcaggaagctgcggtgggaggattgcttgagcccaagagttccaggctatagtgtgcgatgatcacacctgtgaatagctattggactccagcctggacagcatagttaggccctgtctcttacacaaaacacaaaataacaaaatgaaaacaggtcgggtgcggtggctcatgcctgtaatcccagctctttgggaggctgaggtggggggatcacctgaggtcaggagtttgagaccagcctggccaacatggtgaaaccccatctctactaaacatacaaaaattagctgggcgcggtggcacacacctgtaatcccagctacttgggaggctaaggcaggagaattgcttgaacctgggaggcagaggttgcagtgagctgagaatgtaccactgcactccagcctaggtgacaaagtgagacttcgttgcaaaaacaaaaacaaaaaaacaaaaacaaatggaaacagagaagaatgtggtgctaaaaaaaaaatctaggctgggcacggaatatgcctgtattcccagcactttgagaggctaaggtgggtggatcacttaaggttaggagtttgagaccattctggccaacatggtgaaaccctgtctctactaaaaatacaaaaattagccaggcatggtggtggatgcctgtagtccagctactcaggaggccgaggcagaagagtcacttgaactcgggaggcggaggttgaattgagccgagatcgggccactgcactccagccttcgcaacagagtaagaccctgactctaataataataataataatataataataataataataataataataataattaaagatggctttaaaacatcctaagtctaatgagtcataaacctacaaattcaagctcagcaaatccccaaacagaaaacattaagaaatcctgacataaccaaattgctaaaaactaaagagaaaaacaatcttgaaagccaccagagggaaaatataatgcatactgacatacacaggactaatttaaatgactgcatatttctcttcagaaaccatgatagggccgggcatggtagctccacctgtaatcccagcactttgggaggccgaggtgggtggatcacttgaagtcaggagtttgagaccagcctggccaacacggtcaaaccccatctctactaaaagtaaaaaaattagccaggcatgatggcgtatgcctgtaatcccagctacttgggaggttgaggcaggagaattgcatgaacccaggaggtggaggttgtagtgagccaagacaaagcaagactccgtctcaaaaaaaaaggaagaaaaaaaacaaacatgaagaccagaggaagcggcattttcatttttttgagacagagtcttgctctgtcacgcccaagctgcagtgcagtggctcaatctcggctcactgcaacctccacttcctgggttcaagtgattctcctgcctcagcctcctgagtagctgggactacaggtgcgcaccaccatgcccggctaatttttgtatttttagtagaaacggggtttcaccatgttggccaggctggtctcaaactcctgacctcaggtgacacacccaccttggcctcccaaaatgctggattacaggcatgcgccaccatgcctgaccaccttgtgtattttttaaaacagttgataaaactaaggtttgagggctggccgtggtagctcatgcctgtaatcccggcactttggaagaccgaggcaggtggatcacctgagctcaggagtgtgagaccagctctgccaacatgctgaaaacacatctctactaaaaatacaaaaattagctgtgcatggtggcgcgtatgtgatggtgcgcacctgtaatcccagctactctggaggctgaggcaggagaatcacttgaacccaggaggcagaggttgcagtgagccgagattgagccactgcacttcagcctgggtgaccaagggagactctgtttcaaaacaaaacgaaacaacaacaaaaacaagatttggtcgttgtcggcagtttcactttcctgtatctttataactgtctatggttgttttttttgggtttttttttggagagacagggtctcatttggtttcccagtgtggagtgcagtagcacaatcacaactcactgcagctttgaactcttggactccagtgatcctgctgcctcagcctcccgagcagttaggactaaaggcatgggccaccacgctcagctaagttttactttttttgtagagatggggtctcactacgttgaccaggctggtctcaaactcctaggctcaagcaatcctcccgcctcagccacccaaagtattgggattccaggcctgagctactgttactggaaaggggtcctgatccagaccccaagacagggttcttggctcttgcacaagaaaaaattcggggtgagtccataaactggaagcaagtttattaggaaagtaaaggagtaaagaatgcctcttccatagacagagcagcaggatgagctgctagttggccatttttatggttatttcttgattatatactaaacaaggggtggattatttatgacttttccgggaaaggggtgggcaattctcgaaactgagggttcctcgcctttttagaccgcatatggtaacccccctgacactgccatggtatttgtaaactatcctggccctggtaggagtgtcttttagcatgctaatgtattataattcgtgtataatgagcagtgaggataaccagaggtcactcttgttgccatcttggttttggtgggttttggcaggcttctttcccgcaacctgttttattagttaaggtctttatgacctgtatcttgtactgacctcctatctgatcctgtgacttaaaaggcctaacctcctgggaatgcagcccagtaggtctcagcctcattttacatagcccctcttcaagatggagttgctccagttcaaaggcctctgacaccaccgtgcctgggcaatagtaggagctccgacatttaattgttcctgttagtgaatagagcatcatggagaataaatgaaacaaataaataatcgtttctggtaaagagattttgttacatttcagttacaggcaatagaattataagcagttacaaagcagcactgatgtgtcaaagataaagaatgaccacacttggcctggctgtggctcactcctgtactgcaactgcaactcccaacagtttgggaggcgaaggcaggcagattggttgaacccaggagtttgagaccagcctgggtaacaaagtgagaccctgtctttacaaaaaaaatttaaaaattagctgggtgtggtggtacgcacctgggctgaggcaggaggatcccttgaaccgagaaggttgaggctgcagtgaattctgattgcaccactgtactctagcctgagtgacagggatgaccatacttaatagtttgcccggagcagtcctagtttacttttttttttttttttggtgtaattattagaagagcctcatttcactgtcctgacaagatgacaaattctatgaccactttatagatactagttggtttcaacagaatgaaaaactaaaggaaaataatcaccgtatcttcaggatttttttttttttttttgagacagagtcttgctctgttgcccagactggagtgcagtggtgccatcttggctcactgcaacctccccctcctgggttcaagcaattctcttgcctcagcctctggagtagctgggactacaggcgtgtgccaccatgcccggctaatttttgtatttttagtagagacggggtttcaccatgttggccaggctggtctcgaactcctgacctcaggtgatcctcccggctcggcctcccaaactgctgggattacaggcatgagccaccacgcccggccatcttcaggatgtttgctggacttgggaaggagcagagggatccaacataataaacaactgcaaagacttaaaattttgaatagaaattatggggaaatgctgttttagaaagcatgattacctagtacctagtattcaggatggacaaatggcaggcactaattgtaatcaatagaggtgaggtgataggagtttggattatgttggttttgctagtctatgaattttgggattctactttgggtagtgtttagaaattgggacctaatgaatgcatcagaaaaagtcaatatcatgagtaatcaatatatttttatcttacaagataaaatcctagctacagctagaggattttagagaaaagtgatgaggttttattttttaaactttttaaaatacttcgctgaaaattaaaatactaatgttcaccacagttttgtgtgaaaacaggttgtttccctgctgctgaaattacaggatcattattcaagtgtttttggtggcctgggtcagtgaggcaatagcttaaggcttaaaaaacaaacaacaaacaaaccaaaagaagaatcctaaccaaagcaaaaacacaccagaaagtacacactgatcttgaaatttggtttgcatatggacagctccctgattattctctagggattttgattttttgttctgtagggtcatatgagaggcaatcttggtcattagtaatttactatactgggccaaggaagcaattggaagaacaaagaactcccttaaagttactcttttccattaaagatgagtttcgtagctgggattgctaggtagcaagaacaaatagttcactgaagagtttctccatgtctctgtactttgaagtgactcatgagctggcagtatgtacaaagcacccactagtttcttccattaaaaaatatgatcaccacacgttttatctccagtgaaggctcataagagaatctcaaaccatctttgtggataataaaatggggtaattagaactggctggtcgttcgtttggagaaatttctttctttctttcttttttttctgagacggagtttcgctcttgttgcccagtctggagtgcaacggtgcgatcttggctcaccgcaacctccacctcccaggttcaagcgtttctcctgcctcagcctcctaagtagctgggattacgggcattcgccaccacgcctggcttattttttatttttagtagagacggggtttctttctctttttttttttgagacggagtctcgctctgtcgcccaggctggagtgccatggcgtgatctcggctcactacaagctccgcccctcgggttcacaacattctcctgcctcagcctcccaagtggctgggactacaggtgcccgccaccacgcccggctaattttttgtatttttagtagagacggggtttcaccgtgttagccatgatgatctctatctcctgacttcgtgatccgcccgcctcggcttcccaaagtgctgggattacaggcgtgagccaccgcgcccggcccttagagacggggtttctccacgttggtcaggctggtctcgaactcatgaccgcaggtgatccgcctgcctcagcctcccaaagtgctgggattacaggtatgagccactgcgcccggtgcatttggagaaatttctactttgatctaagaactttaaatttgggctgggcggatgactcacgcctgtaatcccagcactttgggaggctgaggcgggcacatggcttgagctcgagttcgagaccagcctgggcaacatggtgaaactccatctctagaaaaaatacaaaaatggccgggctcagtggctcacgcctgtaatcccagcactttgggaggccgaggtgggcgaatcacgagttcgacaccagcctggccaacatggggaaaccctgtctctactaaaaatacaaaacattagctggatgtggtagtgggcgcctgtaatcccagctactcgggaggctgacgcagaagaattgcttgaacccgggacacggaggttgcagtgaaccgagattgcaccactgcactccagctcagacgacagtgcaaagactgtctaaattaaaaaaaaaaaaaaagaaagagaaaaaaagaaaaagaaaataaaaaatacaaaaattaccaggagtggtggtgcaggtctgccgtcccagctactcaggaggctgaggtgggaggatcacttgagtctgggaagtcaaggtagcagtgagctatgattgtgtcactgcactccagcctgggagacagactgacactctgtctcaaaaaaaaaaaaaaaaaaaagaaagaaagaaaaaatggccaggcgcagtggtggctcacgtctgtaatcccagcactttgggaggccgagtcaggcagatcacgagatgaggagttccagaccagcctggccaatatggtgaaaccagaccagcctggccaatatggtgaaaccccgtctctactaaaaatacaaaaattagccaggcatggtggtgcacacctgtagtcccagctactcaggaggctgaggcaaaaagaactgctttaactcgggaggtggaggttgcagtgagcccacatcgtgccactgcactccagcttaggtgacagagtgagactctgtctcaaaagaaaaaaaaaaaagaaaaaaaaacttatttagtcataaaaagcctatggggtcgggtgcagtggttcacacctgtaatcccagcactttgggaggctgagatgggagaatcacttgagctccggagttcaagatcagcctgggcaacatagggaggccctgtctctacagaaaaaaattttttaattagccagcatgttggtgtgtgcctgtaaacccagctacttaggaggctgaggtgggaggatcacatgagccgaggagttggaggttgcagtgagctatgattgcactactgcacaccagcctgggtaacagcaaaactgcccccctctgacgcccctgctaaaaagaaagcctatgaggctcataatattcttttttttttggagacggagtcttgctctgttgcccaggctggagtgcagtggcgcgatctcggctcactgcaagctctgcctcccaggttctcgccattctctgcctcagcctaccgagtagctgggactacaagcgccagccaccacgcctggctaattttttgtatttttagtagagatggagtttcaccattaggatggtttcgatctcctgacctcatgatccgccctcctcggcctcccaacgtgttgggattacaggcctgagccaccgcgccccgcccatattattccttctacaatttacaaaggatgaaacaatgaaggcacagaaatttaccaagaaatgtaaaactcagctagtgttcatcctatttgtaaatggcaccactcagctgatcaagcccaaaacacagaaaacatcttttttttttttcctctaacacctttaaggtttcttggatttgaacatccttgattctttccctttgggtccggagttggttccttccggtggattcgtggtctgacttcaagaacgaagccgaggaccttctcgttgagtgttatagctcttaaaggtggcatggacccaaagaatgagcagcagcaagatttattgtaaagaaggaaacaacaaagcttttagctttccacagagtggaaggggcctggagcaggttgccgctgctggggggagtggccagcttttattcccttattgtccccgcccatgttccgtttctgtcctagcacagtgccctttcttcaatcttccccacgattggcttttagactcctgctgattggtacgttttacagagcactgattggtgcattttacagagcactgattggtgcattttacagagtgctgattggtgcattttacaatcctcttgctagctacagagcgttgattggtgcgtttttacagatcactgaatggtgcattttacaatccccttgctagctacagagtgctgattggtgcaccttacaatccccttgctagctacagagtgctgattggtgcgttttccaatcctagctacagagtgctgactggtgtgttttacaatcctctcctaagacagaaaagttctccaagtccccactctacccaggaagtccagctggcttcacctctcaccttcatcctgtaaccgagtcctaacttgttctgctcactgcatgacagccaaggggtgaagagtcaaggagttagagcaaggatagtaactttatttctgagagctagcaaacccggaaaattgcagaataatgtactaaagaaccatctttttggctgggcatggtggctcacgcctgtaattccagcactttgggaggccagggcgggtggaacatgaagtcaggagttcaagaccagcctggccaaaatggtgaaaccccgtcactactaaaaatgcaaagaattagccaggagtggtggcgggtgcctgtaatcccagctactcaggatgccgaggcagaagaatcgctttaacccgcgaggtggacgttgcagtgagccaagattgagacactgcactccagcctggtgacacagtgagactccatctcaaaaaaaaaaaaaagttggagtcttgctctgtcgcccaggctggagtgcagtgccttgatcttggctcactgcaacctccacctcccgggtttaagtgattctcctgtcccagcctcccgagtagctgggactacaggcgcacaccaccacgtccagctaatttttgtatttttagtagagacggggtttctccatgttggtcagtctggtcttgaactcctgatctcaggtgatccacctatttcggcctcccaaagtgctgggatgagaggtgtgagccatcacacccagcctgaagaaccatcttaagttagtacacatttcaggctctttttgtgttaagggcagggggaagaagagagggtttgaatcaaggggtgactgatgaccgtagacatctgggcgccagcaagggttcctcgaggcctgaagcctctctgttactggtcaggtcacaatactttctcaaactctcaacattgttacttgtgtgtacaccctccttttctccttgggggttagttttgggaagggactattatcatccttgctttaaagttaaactataaattcctcccttggttagcttagtctatgtgcagagataagcaaaagcagttaacttagatatcaccgatgggtgggagtggggagtttaggagcaaaatggagttagtcatgctaggcctccttttcaatgttacaattccacattatcaagttatttcaatcccacattatcaagttatttcaatatttccaaatatattcttcttcttcttcttcttctttttttttttttgagcgagagttttgctctgtcgcccagaggctggagtgcagttgcacgatctcggctcactgcaaccttcacatctcggattcaagcgattctcctgcctcagcctcctgagtagttgggattacaggcgtgcaccatcaaaacccgctgatttttgtatttttagtagagacagagtttcacaaagttggcaaggctggtcttgacctcctgacctcaagtgatctgcccctctcagcctcccaaagtgctgggattacaggtgtgagccaccgtgcccggccttttctttcatttctttttttaaaattttttaaaattttatgtatgtatgtatgtatgtatgtatgtatgtatgtatgtatgtatctatctatctatctatctatctatctatctatctatctatctgtcttgagagggactctctgtcacccaggctaaagtgctggagggcaatggcgtgatctataggctcactgcaatctccgcctcctgggttcaagcaattcttccgcctcagcctccccagtagctaggattacaggcattggccaccacacctggctatttttagtagagacggggtttcttcatgttgtccaggctgttctagaactcctggcctcaagcgatcttcccgcctaggcttcccaaaatgttgggattgcaggcgtgagccaccacgcccagcccaccacgcctgttaataagctataccctcacggacctgtcattggcattaaatttgataatacattagagtattgtatatgaagtatacgaaggcctgtgctgagtgttcaagaagtcagtcagtattattctacttatattaataaatgaactgatgaaatgacaatggcgagatctcgatcttcaacaataagggagatggaaactgaagcaagaagtggtctacaaacctagctcaaattgttgagattaccggccgtgccccttattcagatcaacccctcctcggctgatcgccggcgcgagccagcctaggctcccggaaggtaaacacatcgccaagggctgggcagaaggcgggtgtgggacgggtgagtggccagctaaaagtgattggcagctgccatgtccacgtgctccgagcttggaaccagctgtcgcgagaattcgatgtaaacagaccagtctccctgtcctccggctccaacctgaaacgctcacgtgagcgggacaggagtctggatcatgttgcttttcttttcaaagccacgaaggttctgtcttccaaaaaaaatgtacatgttcgtaattattccccagctgcctgcgtttgcaaccgaacctgacacctcggcttcacccgaacttacatgctgttgtgttttccctccagccccagcggattggacacattcagaaggcgggtccgcctctttcctacttgctggttggcgaagctgacctccaagggcggtgcccggccatagccggtttgcttctgggattggctagagggggtggttccgctgaggcgtggtaggaagtggctgccgtcaatcactcggggagactccaaacagtgagcctagagctggagactagcgttaaccggcggggcggccggtgagagggctggcagggctttggctttggggaggcttggggaggacgagggactggcggcgtgaggggactgggtcgggctggcaggaattcgacaggagagaggtgtcgatactggagggggaggggaacagtgcaaggggccggagggcggccgggggcagcggtggctccgtgttggaggttaagtgggcagcgccgtacgagtgtctttcaggagactggggcctgagtggctggcgagggtcgtccccaggagacagggcccttaaagggcagggcttgggagactgtggttcgagaaagcaagaatgggatgagaatgagagggctgaggggctggaggtgcaggtatcctctgaggaggtggtggctctgctccttggggcagagggtgttttggttgtaggaggtggggcgcacaggtttagagttttcacatcaggtgtgaatgctccctacttaaaaatggttttcggtgccttcaagatgagttccaggttgtgggcttccctgagccctgtaagagatctttgatattgctgtcagtcctcttttaaccttaaccaagccgactccatgctcttaaaatctcagtgattcagagggtcatgaaacattctaggatcaggatttactgatgtgacgggaaagggtaaagggctgtaacaacgtattagtttatgttagttatttgactacttgctactagtcaaataattacttgacttatttgttatagtagcagggggttacgaatgtgatttaaattgtgatttactcatagattcccaacaggtttaattggaaggtagagtgatatcatgtcacttgttccgtttggtcttgaaatattgtaccatgtgtattttcactatctcaacataaaattgcagtaaattcccatcccatgatctggttctctcacccttgtaatttatgttaacaacagaccaaggggtacagcaggagtcttccttacattgttttgtggttctgagacctggtcctattaaaaaacaaaacaggatgggcgcggtggctcaagcctataatcccagcactttgggaggctaaggcggatggattgcttgagctcaggagttcgagaccagccttggcaacatggtgaaaccccgtcgctacaaaaaaatataaaatttagctcggcatggtggcgctcgcctgtaatcccagctactcaggaggctgaggcaggagaattgcttgagcctgggaggcggagattgccatgagcagagatcgtgccactgaactccagcctgggcgacagagcgagactctatctcaaaaataataataaccccccaaacccctcattataatttgaaaaaaattaaaaacctacttcctccttttttccctttctggtgtaacaggaatttctgggaaagtttcctacatttgaggcatttttgacaagggatctctagtgagtaatcataaatcttcctccctacccccaacaacgatccatgtttttctgttttttgtttgtttgtttgttctggaaacaggttttatgaatgaagctatggctacagattccccaagaagacccagtcgttgtactggtggagttgtggttcgcccccaggctgtcacgtaagcacatttcagataaacccaatagctgaagaaaagattactcagaatactaacatttaggttttctttatgaacagtggttacttttgtaaaaatcttttaactgttggctttatgggatgaataataataattgccaagaccaaatgaagaattggagagttaagttgacgtattcagcacatttacagagtacgtgaagagcactatgctaaatcctgaagagcagtgttttcaaactccaggtttaacaaattagtggattgttaaatcagtttagtgggtcaggagttgtagtagaaaatgaaatagaggccgggcgcagtggctcatgcctgtaatcccagcactttgggaggcccaggcaggcggatcacgagatcaggagatcgagaccatcctggctaaaacggtgaaaccctgtctctactaaaaatacaaaaaattagccgggtatggtggcccctgtagtcccagctactcgggaggctgagtcaggagaatgacgtgaacctgggaggtggaacttgcagtgagctgagatcgcgccactgcaccctagcctgggcgacacagcaagactctgtctccaaaaaaaaaaaaaaaaagaaagaaaatgaaatagaatataatagaaaattagaaaatatagctgagagtttgtattgtttcatgacatgcacataaatatgttcatgtgtatgtatatatttaccagacagtgatgtaaaatgtatctcttttaacttttaagttcaagggtacatgtgcaggtttgttatatagggaaactcatgtcacaggggtttgttgtacagattatttcatcacccaggtattaagcatagtccccattagttatttttcctgaccctctccccgctcccacccaactctgataggcaccagtgtgtggtgttcccgtctatgtatccatgtgttatctataaaaggaatctcttagtctaggtctctgtcagaaagtttcaaagtaagtgtcatagtatatgtctctgtttttggcattctttgacaaagaatgtctatacttactagagtgagtttataatctaatatggtttgaagatatgtatactttttttttttttttagatggagtctcactctgttgcccaggttggagtgcagtggcgccgtctcggctcgctgcagcctccacctcctcctctgtctcccagattcaagcgattctcctgccttggcctcccaagtagctgggattacaggcgagcgccaccaggcctggccaaattttgtatttttagcaaagacggggttttgccatttggccaggctggtcttgaactcctgacctcaggtgatctgcctgtcttggcctcccaaagtgctagaattacatgtgtgagccactgtgcctggccaaagatatgtatacttgaaggctgacatgggaggattgcttgaaaccaggagtttgacaccagcctgaacaacatcctgagaccctcatgccttaaaaaaatacaaaaattagccaggcattgtggcaggcgcctggagccttagctactcgggaggctgagatgggaggatcacctcggcccaggagcttgaagctgtggtaagctgtgattgtgccattacactccagcctaggtgacagagtgagactgtgtcttaaaaaaaatatatgtctgggcgcagtggctcatgcctgtaatcccagcattttgggaggctgaggtgggcggatcacctgaggttgggagtttgagaccagcctgaccaatgtggagaaaacccgtctctactaaaaatacaaaacttagctgggggtggtggcaatagcctgtaatcccagctacttgggaggctgaggcaggagaatcgcttgaacccgggaggcggaggttgcagtgagctgagatcgcaccactgcactccagcctgggggacaagagcaagacttcatttccaaaaaataagaaaaataaatagatatattttatatgtatatatattattcttttttttttctttttttgagatgcagtctcgctccattgcccaggctggagtgcagtggcatgatctcggctcactgcaacctccgccttctgggttcaaatgattctcttgcctcagcctcccaagtagctgggattacaaatgtggatcaccacgcctggctaatttttgtatacatatatatatattttttgagacggagtttcgctctttttgcccaggctggagtgcgatggcacgatctcggctcaccgcaacctccgcctcctgggttcaagcgattctcctgcctcagcctcccgattagctgggattacaggcatgcgccaccatgcctggctaattttgtattttttagtagagacagggtttctccatgttgtccaggttggtctcaaactcccaacctcaggtggtccgcctgcctcagcctcccaaagtgctgggattacaggtgtgagccaccgcgcccggcctaatttttgtatttttggtagagatggggtttcatcaaattggctaggctgaagcaaacaagtgaataagtaaaataatgacaggctgtgattgtgcaccgtgtactacaatggagagtgacaaaggagaatacatataaggctgtcccggaagctctctcaaaggaggcagcacttaacccggagaactaaaaggaagggaaggggatgggaaggaatccagatagaaagaaaggtggtataaaggtcttgattcaaagaagaacttggtgtgtgctaggaattgaagttgcatatggctgaatcagaataaggagagtggcaaaaaatgaggttggagaggtagcctaataattttcttttttaggcctaatcgatttttgtaggtctctagggcatattgcttttttaataggatttatgataaatcatattattttcaagtgtgatttttcacatctcttgaaatggatttgaattagtattttgattttttcgttgttgtttttttgagacagagtcttgcttttttgcccaagctggagtgcagtggcgcggtcttgactcactgcaacctccacctcttgggttcaagtgattctcctgcttcagcctcccgagcagctgaaattacagggtgcaccaccaggcccagctagtttttgtatatttagtagcgacagggtttcaccatgttggccaggctggtcttgaactcctgacctcaagtgatccactcgcctcggcctcccaaagtgctgggattacaggtgtgagctaccacgcctggcctaaaatagtattttgaagaagttgtttttttccacttgctgaaatttacgtactttgtatttaaaatacattaatttagtgtccttacttaattaacagtgttatttttttccccttccctttttttgtttgttttttagagatggggtcttgctatgttgcctagtctggctgccaacttctgggttcaactccacctcagcttcctaaatagctgggactataggcacatgctactgcatccagctttccctcatttttatgcattttaatttttttccatgtcttttctataccaaaagttctgtaaaggcttaatagcttcttctaatgcctgtatctaccagaaaatgtagactgacctgctatatacaggtaagggactaggttcataaccaatttaaggagaaggtcactagatagtgagtcatcagcaatagttttacttgctctaattagggcattcttctgctctgactcaagaggaaggtcctaccttaggtctctgtcatcactcctccaaatatgacttagaagctatctctatcaaattaggagagcatgacttttaaaaagagataatgtttaaaaatgttaaaagcccatttacatttaataacatatataaagacccatgaaacgagaaagtagtttagcagaaatatcaggtgataagagttagcctttttttttttttttttttttttttttttttttttttttgccttttttgaatattatgagtgatgcctgtaatcccagtactttggaagactgaggcgggaggatcgcttgagctcagaagtttgacaccagcctgggcaacatggtgaaacaccgtctctacaaaaaatacaaaaattagctgggcatggtggcgcatgtctgtagtcccagctacttgggagcctgaggtgggaggattgcttaagccccggaggtcgagggagcagtgagccgagatcgcaccactacactccagcctgggtgacagagtgaaaccttgtctcaaaacaaaacaaaacaaaacaaacaaaaaaaccccaaaaaacaaacaacaacaaaaaacaagtgactttattaaggcttgtaaatagagcttttttcatgttctatattaagctctcctgaccagtgttgtccatttcacccttttccagagagcagtcctacatggaaagtgttgtgacttttctgcaggatgttgtgccacaggtaagtgtctatatgtgctttcgcctttccctttggtcaggagagctctgaaatgtttggtttcctaaacttgacactagtaccagcaacttccaaaaggtttttgatgttttagcatcctgagcattcgtagggtgggactacattattgtttagatgtgccgcagtgttgtgatgacagtggcataaatattattccttaggactttgccttcctaagaagaatcaaggtgaattgttagtagagatttgagacctgggactttctttcttaggtttctattttcttgtcctatttaagtgttgcctgccagaagggagaaaagcaatatacactctgcactccttaactagatattagctaagtattgtacctgaacacaaatctacatctcttttatattgagcagcatttttatgccaactaaggtatcctgttactctaactgataaaagattaagtcttttactgttccttttatataaatatgagaataaagaatgagaatagccttactgggattatctagtatactattgccaaacttaacataattatcacttggcatacttattaaaagtaataatttcctctctcagagtcttaacacaattgatttgggatggtaactggtaacttgtagcaatagtaagaatctcaggtgattcttatgaaatggtacctttgggaagcactgttctagtgggactactgaagggaaaggtttccatactttctccttatggttgtagtcttccttgactaccatgggtatgtgtaactggagtgttcaaaaaggacattcatagatccagtgtcccagctttatgagaggatcctagaaaacacagtgccttcaacctgaaaagctgagtgggaaaaaaaggagaaaagaaacagtgttatggtaatatagtagaaggaaaattaaattcagttggaggacatcaaagaaggcttaatgaatgagatgccatctgaattgaggaatagagtggaataaaatccaacaatgatcaatttagtgagaatgtaatggggacaacaggatcctagtaggtgtttgctttatttggcagagaggttataacttaacattttgcacattaggcttagagtagcttagtgattaagaacatagactttgggccgggtgcggtggctcacgcctgtaatcccagcactttgggaggctgaggtcaggagttcaagaccagcctgaccaacatggagaaaccccatctctactaaaaatacaaaaattagccgggtgtggtggcgcatgcctgtaatcccagctactcaggaaggctgaggcaggagaatcacttgaacccgggaggcggaggttgcagtgagctgagatcgcatcattgcactccagcctgggcaataagagtgaaactccgtctcaaaaaaaaaaaaaaaaaaaaagaacatagtctttgatattagatctgactttatatttcagctctgcatcttactagtttcagacaagttactgaacctttctaaacatcagtatccttatgtgtaaactcgggttaatcatcttattcgtcatgggtttgttttgaggcttaaagggtgtcatgtatataaagcataaaataaagcaaagcaaatactaagtagtctttcctggagggagcttgagactggagatccagggtagagatgtagatttttggtgtacaatcgtagtcgaaataatcagatgagccagatacattacaatttctaattgtaatggtgagacgtcgtcattttagcacctactgaccataggttgcttaggaaagcaataataggagtaactttttgttatattagacattttttttttttgagacagagtctcactctgttcccagagtggagtgcagtggcatgatcttggctcactgcaagctctgcctcccgggttcatgccattctgctgcctcagcctcccgagtagctgggactacaggcgcccaccgccacacctgtctaatttttgtatttttagtagagacggggtttcactgtgttagctaggatggtctccatctcctgaccttgtgatctgcctgcctcggcctcccaaagtgctgggattacaggtgtgagccaccgcacccggcctatgttagacattttttctactgtttggttgacatgagaacagtgctttctaacattttttttcccacatttaattcagagtcctgcgttggtactttgtggtcagacattaaaaaataatgttttctgccaatattgtgttctacctcctgctctattctgggaatcatcaaattcatggagcctaggtattctctgggtctgcaaatatcctcctaaagagagaacatgtgttgttggactggtagcagcttctttagttatcactcattgaattctagttgtgataacattgatggatggtagttgcccttggctgtgtcttgatctaataatttcacttatgaaaatttatttatttaattttttttttttgagatggagtttcactcttgtcgcccaggctggagtgcaatggcataatctcggctcactgcaacctctgcctacgagtttcaagcgattctcctgcctcagcctcctgagtagctgggattgcaggcatgtgccaacacgcccggccaatttttgtatttttagtagaaacggggtttcaccatgttagccaggctggtcttgaattcctgacctcaggtgatcctcctgccttggcctcgcaaagttctgggattacaggcgtgagccactgcacctggccgaaaatttattttaaaaaataattcaacaaagaaaaagttgaagcttagaacttttcagtatatatgaaatttttacattttcagtgtaaaaacttgtaaccagcttaaatgtcaattaataagcaaatgatgatatatcatggtccctatagaataatttgctataaataaaaattatggcaatagtacactatggaaattattttctctatagtgagcaaataagacaacatacagaatgacacctacaatgattatagctatgttatataaaattcaaaaataactttgtacttatcagtgtgtgtagtgtgttagaaaccagtgttgaaatataaaagaagtaaataaatcttttcagtagtgaggtgaaagttttgactttaaataagagggctaaatcggttgctcttgtttgaagaagggcttttaatcagtgctgggggaaaaggaaaagtgtggcagtacactgacctctataaagacatcaggtgatcctgggtgtggtggctcacacctgtaatcccagcactttgggaggcctaggcgggcagattgcttgtgcccaggagtaccagaccagcctgagcaacatggtgaaaccccatctctacagaaaatacaaaaattagctgggtgtggtggtgcacacctgtagtcccagctatttgggaggctgacatgggtggaccgtttgagcccaggaggcggaggttgcagtgagctgagatcataccactgcactccagccggggtgacagaaccagaccctgtctcgagaaatacaaaaacagaaacccaaaaacaactttttttttttaaagacatcaggtgaaaggtagaagggcaataggtgagtctgtgtcttactgagaataaaatatctaagcatgggaaaaggagatcataagaggcaaaaaatgacgtgattcacctttgtgcaaagctgtagtaaggaacacacgaagcagagctcaggtgcttcagttgtcttcccagaattttctcaaaaattctgagtaaaaaacaccatgtccactaaggagagaggaaacttgaagacatagtgaaagcatataagcctcattttgtaagacttatttccccctcacagggaaagcaaaaagaggttcaagaatcccaatacactgaaagaccttctttgaccttgttttgttctgcatatcactcagaaatcaaatgtcgcaaaggaataagtctgctaagctgaagaagaatttgaaaatgttattgcttcaccacgttaaaggaaaggaaagcctgatacaggaaaaaaggaagttgtcctaaatgcaggatagcatcctggtttggatcctggagcagagaaaggacattagtgagaaaggttgtgaaatccaaataatgtctggggtttaatagtaatgcaccagtgttacttttgtagtttcgagaaatgcaaatgttagatttgattagattagataatattaggggagaattttttttttgagacagggtcttgctctcacccaggctggagtacagtggcactatcatggctcactgcggcctcaatttcccagattcaggtgatcctcccatctcagcctccctggtagctgggactacaggtgcatgccaccatgcccagattttttttctgtagagatgaggtttctccatgttgcccaagctggtgttttttaaaaaaggtatgttaggcagggcatggtggctcacctgtgtaatcccagcactttgggatgccgaggcggggcggatcacctgaggtcaggagttcaagaccagcctggccaacatggtgaaaccccgtctccaccaaaaagacaaaaaattagctgggcgtggtggcacacgcctatagttccagctacttgggaggctgaggcaggagaatcacttgaacccgggaggtggagggtacagtgagccaaaatcatgccactgcactccagcctgggtgatagagtgagactctgtctcaaaaaaaaaaaaaaagaaagaaaaaaacatgctttatggagagatgcctccttttgaatactgttgaatactgttgatacttcatgccattaatgcttgtcttttgatccttgcaggcttccaggaagcagctgataggttgggtctagaagcttgataagagactaaaaaagtacagtaatactcacaccagtataattgccacaaacacctagcacttaatagttaaaggtagtagttgtgtttgttttctaagccttatttgttgaccagtatagcggatggttagtctttcatttgcctttgaattatagtaatgcttcaaaatagattgtgatcattgtattttaggtttctgcagttcttttttttgtgggggacagagtcttgctcagtcgcctaggctggagtgcggtggcacgatctctgttcattgcaatctctgccttccaggtttaagtgattctcgtgtctcagcctccccagtagctggaattacaggcatgtgccacacctcacccagctaatttttgtgtttttagtagagacagagtttcgccatgttggccaggctggtcttgaactcctggcctcaagtggtctgcctgccttggcctcccaaagtgctgagattacaggtgcctagcctgcagttcttttaataagttaaaaactcttttgaccaaggttatgagactcatggataatattctttgggggtaataatgttctaaaatattctagttaccaagatgtagggttggtgaagttggagaggtatagtgttggctttaagtcactttgttttgaacatcagtaatattaaagctgtaaaatatgtttattcaaatgtttctgtttactatgcaggcttacagtggaacacctctaacagaagaaaaggagaaaatagtctgggtcagatttgaaaatgcagatttaaatggtatggttttaactttttttgggacgtgtgaattaattgtttgtttggagtacctgattccaaaaagagagcctctactttagtcagattactttctcttatagtaatttttcagttttcaaaataaaaggtagcataaccgcagtacagaaactttagaactaatattgtgtaataagccttaaagtaactataacacagtgtgtaagtgttaaactttgatgaagttaaagtgagttaaaattttcttaggcagaaaaatggttttcttaaaaaaggagttattcaagtttggtcagttatataagatttataactgcaaaataatcattagtgttgaactttcttggcttgaaaattgtttttttctgaacagaattttatgctagtccaagtacctcatataagtggaatcgtacagtatttgcctttttgtaactggcttatttcacttagcatagtgtcctcaacgttcatctacattgtagcataggtcagaatttccttccttttaaaggctgaatgaggcagggcatagtggctcacaccagtaatcccagcactttgggaggttgaggcaggaggatcgcttgatcttaggagttcaagacctgcctgggcaacatagcgcgaccttgtctctacaaaaacttaaaaaattaactaggcttggtggtgtgtgcctgtagtttcagctacttgggaggctgaggtgggaggattgcttgagcctgggaggtctaggctgcagtgagccgagatcgtgccactgcactccagcctgggtgatggagtgcaaccctgtctaaaaataaataaataaatacagttaaataagtaagtaaataaaaaaaaatcatttataaaaggctggatgggctgagcactttggctcatgcttgcagtcccagcactttgggaggctgaggtgggaggatcacatgaggtcaggagttcaagaccagcctggccaacatggtgaaacctcgtctctactaaaaatacaaaattagtcgggcatagtggcacactcctgcagccctagctgctcaggaagctgaggcaggagaatcgcttgaacccaggaggtggaggctgcagtgagccgagattgtgccactgcattccagcctgggcgacagagcgagactttgtctcaaaaaaacaaaaacaaaaacaaaaacaaaacaaaagggagtctcactctgtcgcccaggctggagtgcagtggaatgatcttggcttactgcaacctgcgcctcctgggttcaggtgattctcctgtctcagccccctgagtagctgggattacaggtgctcgccatcacgcccagctaatttttgtatttttagtagagacgaggtttcaccatgttggttaggctggtctcaatctcctgacctcaggtaattcacctgcctcggcctcccaaagtgctgggattacaggtgtgagccactgcgcccagcctcctatctctttgagactctacttttgagaattgctggcttatatagtaatgctgtttttaatgttttgaggaaccaccatggttttcctcagtgaacgtaccatttttcattcccaccaacaatgtacaagggtcccaacttctccacaccctttccaacacttgttagtttcctctctctctctctctctctttttggtagtagccatcctaatgggactgggttgtggttttgatttggattttcctgatgattagtaatgtttagcatctttttatgtgcttattggccattcatttagcttctttggagaaatggctcttcatgtccattgcccattttttaattgtttttgtttgtttatttagttttaggagttttctaaatatcctgggtattaattccttattagatatatgatttaacaatattttctcctatcctgtgagttgccttttccttaaagacttttcaaatatgaagcctttttttttttttagagccaccatccacgatgagaaagtctgagtgtcgcttttacagattggtttcatttgaattttggactctctattagcttattctttcaaataataacaatttgttgggtcctctttatggagagtaaaacattagtttttaagggtgattgtttatgatatccatgacaaatattttttgaaatttttttcattttggaacattacagtgactgaaattagaagtagaagcagtaaagccccacccagagtttgcagtgagccgagaacatgccattgcactccagcttgggggcaacaagagtgaaactctgtctcaaaaaaaaaaaaaaatggagaaacacagaagaaaaagtggattggtcatttcaaagttatttcccttaccagctgtcaacaaagaaacaaaacaatagagaaataactgattggttaacatcaggttacttcaggttatcttttgttctaaagattaaaacagagggaactttattttattttattgatatatttatttatttttgagatggagtctctctctgtcacccaggctggagtgcacccaggcgcgatctcagctcactgcaagcttcgcctcctgggttcacaccattcttctgcctcagcctcccaagtagctgggacgacaggcacccgccaccatgcccgactaattttttttgtattttagtagagacggggtttcatcatgttagccaggatggtctcgatctcctgacctcgtgatccgcccgtcttggcctcccaaagtgctgggattacaggcgtgagctaccatgcctggtgaaacagagggaactttattatcatgcatgttgaatattgaaacaggactccttggccaggtgctcacctgtagtcccagctactcaggaggctgaggcaggagaatcacttgaacccaggaggcggaggttgtagtgggctgagatgtcaccactgcacttcagcctgggcaacagagcgagactccatctcaaaaaaaaaaaaaattagctggagtggtggcatgtacctgtaatcccagctattcgggaggctgaggaggagaatcgtttgaacccaggaggtggaggttacaatgaaccaagatcgcgccactgcactccagcctgggcgacagagagatatcctttctcaaaaaaagaaaaaagaaagaaaagttccatgtcaccaaactgaaactaagttgttatctgaccttaggagaaatcagaaaagagacataacagccaatttcccaaggagaatcgcttgaacgcaggaggtggaggttgcccggctaattttttgtatttttaggagaaacagggtttcaccatgttggccaggctgatcttgaactcctgacctcaggtcatctgcccgctttggcctcccaaagtgctgggattacaggcatgagccactgacttgatttatacccaggcttgtttctctcaagacactacactgagaaaggtataagtagccaaagcagtttaatattctgacatttttctgtcaaattctctaaaggtgagaatatagtttgaatcccagactacatcagatcaaattgatgctggtttactctagtataatgggaattgctttctagcctgtgcagtgaaattcttactatcccctaatcccatacttcatacttggccagtttttgtatttttttttttgacagagtctcactttttcacccaggctggagtgcagtggcctgaacttgaacttggctcactgcagccccgaccttctgggctcaagcaatcctcccacctcagcctccttagtagcttggaccacaggcatgtaccactatgcctggctaattttttgactttttgtagttggggtctcaccatgttccctaaactggtctcaaactcctgggctcaagcagtcctcctacctttacctcataaagtactgggattgcaggtgtgagctactatgcccggcatggccagttctaatatcaaggtctagtactatatttgagtgttggatttcatgttcaacaggccctttttttcagttgcaagtaattgttttaagtaaaaaagggaattatttttttttaattttggaaaaatatagcataaaatttaccattttaaccattaaaaattttaattttttttttttttttttgagatggagtcttgctctgtctcccaggctggagtgcagtggcgtgatcttggctcactgcaagctccacctcctgggttcatgtcattctcctgcctcagcctctcgagtagctgggactacaggcacctgccaccatgcccggctaattttttgtattttttagtagagacggggtttcaccatgttagccaggatggtctcgatctcctgacctcatgatctgcccgcttcggccttccaaagtgctgggattacaggcgtgagccaccgcgcccggccaaacattttaatttttaaaaaaattattgattattggctgggcgtggtggctcatgcttgtaatcccaacactttgggaggctgaggtgagcagatcacaaggtcaagagatcaggatcatcctgaccaacatggtgaaaccccatctttactaaaaaaacaaaaattagctgggcgtggtggcatgcgcctgtagtcacagctacttgggaggctgaggcaggagaattgcttgaacacaggaggtggaggatgcaacaagccgagactgtgccactgcactccagcctggtgacagagtgagattccatctcaaaaaaaaaaaatttattgatcattaaaaattgagacaaggtctcactgtgttgcctaggtgtcgaacttctgggctcaagccatccttctgtctcagcctccgaaagtgttgggattttaggcgtgagccaccatgcatggtcttaattttttttttttttttggtagagatgaggtgttgctgtgttgcccaggctgatcttaaactcaagtgatcctcccacctcggtgtcccaaagtgctgggattgcatgtgtgggcaacaatggccatcatcattttaaagtatattgtcagtattgttaaataatttacattgtcgtacaaccagtcttcagaattcttcattgtgcaaaactgaaactctgtacccattgcacaacaactccacagtctctacctcctcccagcccctggcaaccaccactctactttctgtttctatgatttttaactactttagggacctcacatgggtagaatgatagattatttgcctttttgtgattacctatttcacttaacataatgttctcaaggttcattcatgttgtagcatgtgtcagaattttcttcctttttaaggctgaatcatgcttcattgtatgtatataccacatttttttttttttttttttgagatggagtctcgctctgtcacccaggctggagtgcagtggcgtgatctcagctcactgaaacctccatctcccaggttcaagcgattctcctgcctcggcctccttagcatctgggactacaggcgtgcgccatcacacctagctaatttttgtatttttgtagagacggggtttcatcatgttggccaggatggtctcttgacctcgtgatctgcccacctcggcctcccaaagtgttgggattgcaggtgtgagccaccgcgcccagccctgtaccacattttattttattcattcatttattgaaagacatttgtgttgcttctaccttttggctttgggaacaatgctgtaatgaacatgggtgtacaaatatctcttctagtggaattgttgtatcatatggtaattcttttttaaattttttgaggaaccaccatactgttttccatagaagatttaaaattttatttttagagacaagtcttgctgtgtcattcagggtggaatgcagtgaaatgatcacagctcactgcaactttgaactgctgggctcatatgatcctcctgccttagcctcccaagtagctagcactataggcacatgccaccatgcccagcttatttttaaattttttgtagagatgaggtcttgctatgttgcccaggctgatcttgaactactggcctcaaggaatcctcctgcctcagcctcctaaagtgctgggatacaggcatgagccactgtacttgggctcataggggatttaaaaataatctactcatggatctgggaaagattggggcttcatacttttaatctttgtccacttcttgtcactacttctttctgaatgtttgcatctcttctttgacttctttaacaaagagacagttggtgcagtggttactcaaagctctttattcatacctttatgattatatgatacaatcaaagaggaaaaagtattcattaggagatccagatggctcagtctgagtcactctcccattattggaatagttgctgtggccaaggatgtagtactagaattgctcagctggtcatgtgcctatccctgtgcttgatggaggataagattagttaccagaatagagggagttacagagtagaaagtgtgtgaggtacacaaaggtaatagctgctacagctgggcacagttgcatgcacctgtagtcccagctgctcaggaggctgaggtaggagaatcgctcgagtccaggagttctgagctataatgtgctatgccgattgggtgtctgcactaagttcagcatcaatatggtgacttcccaggagtggggaactaccaggttgcctaaggaggggtgaaccagcccagttcagaaacagttaaaactcccatgctgatgagtagtgaaactgcatcagtgaacagccactgcagtccagcctgggcaacatagtgagaccccatctctaaaagaaaatgctgctatcagcttctattgctttagaagcttgggtcccttagctacctgaagatgcctcctagacatcctcacatagatgtcccacagatgcctcaaactctgatttcttttcccatctaattgtctctccttagcagctgtgcactgaccctatttacctttcaggtcattaaagccacagaacttttcatgcctcaggatctttgcaaaggggaccctctaggtgaaatgttattttctgcccctatcattatttaccttttagagtgtacaaaaatgacttgaaaggctgggcgcggtggctcatgcctgtaatcccaggactttgggaggccaagacgggtagatcacttgagcccaggagttcaagaccagcctgggcaacatggcaaaaccccatctctacaaaaaaatattaaaaaattagctgggtatggtggtatgtccctgtagtcctacctactcgagaggctgaggtgggaggattgcttcagcccaggaggtcgaggcttcagcaggctgtgtttgtgtcactgcgcttcagactgggtgacagggcaagaccctacctctgaatgaatgaatgaataaatgagggagggaaggagggaagggaggaaggaaaagaaagaagcaggtttgggaagaaagattcagttttggctgggcgtggtggctcatgcctgtaatcccagtgctttgggaggccgaggcaggtggatctcctgaggtcaagagttcaagaccagcctggccaacatggtgaaaccccgtctctactaaaaatacaaaataaataaataaataactaaaaaataagctgggcatggtggcaggtgcccgtaatcccagctacttgggaggctgaggcaagagaattgcttgaagccaggaggtggaggttgcagtgagctgagattgcaccactgcactccagcctgggtgacagagtgagactctgtctcaaaaaaaaaaaaaaaaaaaaagattcggtttcactttacaccttgacttttgaggtgtgaatagaaatccagtatccctatcctcccaccagttgcaaacagtcttctaaggagggagagtatactgagtgcagtcatggaagattcacagataagttaagactggacaaggttttgaaggatgggtgaatcaaaggaagggaggacattgtagttggctgaaaccatgcaagaatgctagatgtctctataggaaagaccgtaaagttcagatttagaggtagaataagaaaaaagaagccagtaaagaaaataggccgggtacgatggctcacgcctgtaatcccagcactttgggaggctggggcaggcagatcacgaggtcaggagattgagaccatcctggctaacacggtaaaaccccgtctctactaaaaatacaaaaaattagccaggcgtggtgacgggcgcctgtagtcccagctactcgggaggctgaggcagaagaatggtgtgaacctgggaggcagagcttgcagtgagctgagccgagattgcaccgctgcactggcctgggtgacagagcgagactccgtctcacaaaaaaaaaaaaaaaaaaaaaagagcagcagtggagaaaataaatagtgattctatgatagaggatataaaatgaaaggaaagccaaggaaaaaggatttacttaaatgtataataactttgaggaataatataacatttctacaaaattaaggtttttgttcaagaacaataaagtctggccaggcctggtggcttatgcctgtaatccagcactttgggaggttgaggcaagagtactgcttgagcccaggagttcgagaccagtctgggcaacacagtgaaactctgtctgtatttacaaaaagaaataataataaaagaaatctgctgtatcaccaccatccagagaaagtgactaagtgaaatctaaaataagaaaaaggagattttgtatatattatgacctcaggggttttatgtgtggcatttgaacctgggatcaagatggtacttgtggtagaaagatgattggattgagtatcaaaaagccctaagatttctcattcagttatgagtaaagtatacctaacttgtttttgccaatgataaaatgaagttgacctctctgcatataaaaaaggattccagggccaggcacagtggctcacgcctgtaatcccagcactttgggaggctgaggcaggtggatcacctgaggtcaggagttcaagaccagcctggccaacatggtgaaaccccatctttactaagtaatacaaaaattagctgggtgtggtggtgggcatctgtaatcccagctgcttgggagactgaggtggagagaattgcttgaacctgggaggcagaggttgcagtgagccaagactgcatcactacactctaaccttagtgacagagcgagactccgtctcaaagaaaacaaaaacagaacaaaaaacaaaacaagaacaacaaaaaaacaggattccgtctcaaaaataaataaaacagaattgatatgtcagatttgatgatgtacacaaaagcacatagaaacttataaaacaccatttgtttatttatttatttacttatttatttatttatgagacagagtctcactctgtcccttaggctggagtatagtgacacaatcttgactcactgcaacatccgcctcctgggttcaagcagtcctcttgcctcagcctctccagtagctaggattacaagcatgcaccatcacgcccagctaatttttgtatttttagtaatttttgtattttagtttcagcattttggcctggctggtcttgaacttctgacctcaagtgatctgcccacctcagcctcccaaagtgttgggattacaggcgtgagccaccacgcccagccaaaaacaccatttgaatgtcaggtgtaaaaataattatgccctaggtacataagtttataattctgaattttgctggatatggaatcatgtactattaacatggcaacagtgaattcctgtcaaaagaaaatgggcattaaagaattactgatgtattagccatttaataattttgatttttatctttgagaataggaagtcattaatacgggagatggaggtaaagaggtatgtcattattggtgttttaaaaagagcagttggctgggaggtagggattgcagtgagccgagatcgagccactgcactccagcctgggcgacagagcaagactccgtctcaaaaaaaaaaaaaaaaaaagagcagttttggctgggcttggtggttcacacctgtaatctcagcactttggaaggccaaggtggaggactgtttgaggtcagaagtttgagaccagcctgggcaacagagtgaaatcccatctctacaaaaaaattaaaaaagtagccaggcatggtggcacgtccctatggtcccagctacatgggaggctgaggcaagaggattcctcgagcccaggaggttgaggctgtagtgagtcatgtttgtgtcattgtactccagtttggacaacagagtgagaccctgtctcaaaaaaaaaaaagaagcagttcaactcttacgtgaagtttggtgagcagtggtggaagcaggaagccatgtatgcttttggagtagctgttgtagcttagacagggtggtggtggtgtaagaggaatgaagagaactgtttaggaagacacagggacttgggatagatttactggtataggtgaggaagaaagtggttcctggctttgccaatggggtaatgatgcttttcaccaaaataagggaccctggaggaaaatcaggcttggtgaggaagtcatgatctttgagtggagtttgcactcctgtggagacatccaaactctatattgaggaagtcactagcagatactagttgaagtaatgggtggaatgagttaacctaggagaggatatatggtaagaaatggaaatttagaaattggttttgagtaactccaatatttagagactaggtagaaaagaatgctccagcagagagaatggtgaaggagtgactagagaaagtgaagaaaagttagaggattatccctgaaagaccaagggagagtattttaaggaataaatggtgaccattggttctagttgctgcgcagtctaaaaagatgtgcttgaaaattatctattggattgaacaacttagagattattggtgaccattagtggtgaccagaaatgggaggagtgttagggacattctgaagtgggtttggggtaaatgttagatgaaaaataatgacagttgtgaataacccaattaaggaatttagcttctagaaggagaggggaggctgggtgtggtggctgacatctgtaatcccagcactttgggaggctgaggtgggcagatcacttgaggtcaggagtttgagaccagcctggctaacatggcaagaccccgcctctactaaaaatacaaaaattagccaggcgtggtgacgcacatctgtaattccagctactcaggaggctgaggcactagaatcgctttaactggggaggcggaggttgcagtgagccgagatcacaccactgcactccagcctgggtgatggagtgagtctgtctccaaaaaaaaaataaataaataaaagtcggagaggagagcgatgaaatcaagtcgaggaagaggaatgtttattgctttatgattttggaaaacatttattgtacaaaatatggcaaataacacaaaagtatagattagtgaatgagtttttacaaatccaatgcttatgtaaccaacaccaaaaaaatagaatatagttgaccctttaataatgtgggtttgaactgtgcgggtccactttagttatacccaaactttttggaataaatacattggaaaattttttggagatttgtgtgacactttgacaaaacttgcagatgaaccacatagcctagaaacatcaaaaaaattaagaaaaagatatgtcatgaatgcataagatgtatagatactaacctattttatcatttactataaaatatacacaaatctaggccaggcacggtggctcacgcctgtaatcccagtactttgggaggccgaggcaggtggatcatttgaggtcaggagttcaggactagcctggccaatgtggtgacactccatctctactaaaaatacaaaaaaaaaaaaaaaagaaaaagccaggcgtggtggcacacgcctgtaatcccagcttcttgggagactgaggcaggagatgcgctagagcccaggaggtggaggttgcagtgagccaagattgtgccagtgcactccagcctgggtgacagagtgagactctgtgtcaaaaaaataaaaaaagaaagaaaagtatgtctctctctctctatgtatatatgtatgtatagatacacacacacacacaaatctattataaaaagttaagatttatcaaaatgtacacacacacttaacagacagtacatggtgccatctgtaatcatgtaaacgtatagatgtagttgaattgaatgcaattgaattttaactgcataaaattacctgtagtacatactgtactactgtaataattttgtagtgacctcctgccgctgttgcagggagctcaagaattgcgagtattcgcttaaaatcatctctggtgagcagtttatctttctagtaaattgctgtgtcaaagtaaaaagtgatctctttagattctcacctattttgcatcatgttaattgtaaaactataaaccttgaataccacgatgggacccatatgaagtgcccactagtgatgctggagattctcccaagaatcagagagaagtcatgacatcatgataaaaagttgaattgattgatatgtactgtagattgaagtctgcagctgtgattgcccaccatttcaaggtaaaggaatctggcctaaggactattgttaaaaaagaaaaggaattttttttttctttgagacagcgtcttcctctgtcacctaggctggagtgcagtggtacagtctcagctcagtgcagcctccacctctggggctcaagcaatcttcccacctcagcctccgaagtaactgggactgtaggcgtgtgccacagcgcctggctaatttttgtatttttttgtagagatggggttttgccatgttgcccaggctggtctcaaactcctgagctcaagtgatccgcccaccttcatctcccaaagtgctgagattacaggcgtgagccaccatgctcagtccaaggaaaggaaattcttgatgctgtcattgcagtgacaccagcaggcaccaaaaccttgcacattttgcttaatacttttttatctcatattgaaaatgcaggctgggcgcggtggctcatggctgtaatcccagcactttgggaggccaaggtgggtggatcacctgaggccaggagtttgagaccagcctggccaacatggtgaaacaccgtctatactaaaaatacaaaaattagctgggtgttgtggcaggtgcctctaatcccagctacttgggaggctgaggcaggagaatcatttgaacccgggaggtggaggttgcagtgagctgagatcgtgccactgcactccagcctgagcgacagagtgagactctgtctcaaaaaacagaaaaaaagaaaatgcagcttttaggccaggcgcggtggctcacccttgtaatcccagcactttgggagactgaggcgggcagatcacttgagctcaggagttcaagactagtctgggcaacatggcaaaaccccgtctttatgaaaattagctgaatgtggtggcgtatgcttgtattcccaggcaggagatcgcttgagcttgggaggcagaggttgcagtgagctgagatagcacattgcacttcagcctgggcaatgggagtgaaaccttgtctcaaaaaaaaaaaattaattaaaataaatgcagcttttacatgggtgcaggatgctgtaagaaagacttacctagccgggcgcggtggctcacgcctgtaatcccagcactttgggaggccgaggcgggtggatcacgaggtcaggagatcgagaccatcctggctaacatggtgaaaccccgtttctactaaaaatacaaaaaattagccgggcgcggtggtgggcgcctgtagtcccagctactcgggaggctgaggcaggagaatggcgtgaacccgagaggcggagcttgtagtgagccgagatcatgccgctgcactccagccgcctgggcaacgaagacagacaccgtctcaaaaaaaaaaaagaaaaaaagaaaaaaaaaagaaagacttactatagactctaatatgatttgagaaaaagcgaagtcattatatgacaacttaaagcaaaaggaaggtgaaaaatctaaaactggagaatttaatgccagaaaagggtggtttgataattgtagaaagaagtttggtttaaaaaatgtcaagataaaaagaagcaacttctgccgaccaagaggcagcaggggagttcccagataccattaagaaaatcattgaggagaaaggttatctgcctgaacgagttttttaatgctgagagaagtgccctattctgggaaaaaaatgccacaaaagacatttattagtaaggaagagaagtgcacacccggaattaacgccaggaagggatagactaactctattgttttgtgcaaatacagtcaagtttataatcaggactgtccttatctataatgctgctaacccctgagccttggagggaaaagataaacagcagctgctagtcttttcattgtataacaagaagacctagacagtgggaaccctttttctggattgactccattgatgcttgttcccaaagtcaggaagtacctggccagtaagagactgccttttaaagttttttttgaggctgggtgcagtgcttcacgcctgtaatcccagcactttggggggccgaggtgggtggatcacttgaggtcaggagttcgagaccagcctggccaacatggtgataccccatctctactagtacaaaaattagccgggcatggtggtgcgtgcctataatcccagctactcaggaggctgaggcaggagaatcgcttggaccagggaggcagaggttacagttagctgagattgtgccactgcactccagcctgggagacagagtgagactcagtctcaaaaaaaaaaaaaagttttattgatattgcacagtgcccatggccaccagaaatgtcatgaattcaaccccaaaagtatggaagtggtctacttgcccccagacacggtgtctctatcttgttgttgggcctctagatcaaagggccacatggaccttttaaggctcaccacacatgatactctatggaaaggattgtcaactctgtgaaagagaaccctgatagaacatcaggaaagtgtggaaggatcacaccattgaaggtgccatcaatgttacagaaataaccatgaaagtcagcaagcttgaaacaataaattcctgctggggaaaactgtccaaatgttttgcatgacttacaggatttacgatagataccatcaagaaagtcatgaaagagggccgggcatggtggctcatccctgtaatcccagcactttgggagacccaggacggcagatcaccttaggtcaggagttcgagaccagcctggccaacatggcgaaaccctgtctctactaaaaatacaaaaattatccagatgtggtggcgcctgtaatcccagctacttgggaggctgaggcatgagaatcgcttgagcctgggaggcggagtttcagtgagctgagatcatgccactgtattccagcttgggtgacagagtgagacttgtctcaaaaaaaaaaaaaaaaaagaaaagaaaatcatgaaagaagttgtagatatggcaaaaaagatgagatgtgaagcatttcaagatatctgttttggagaaattcaagaactaagacaccacaccagagaagttaagagaagacagcttgatggagctcagtgcttccaaaccagtgccagatgatgaggaagaagatgtagaggaaacagtgccagaagactgatgttagacagtctgccagaaagcttccaattatttaagactgcttttggcttcttttagacatagatctttctataatactggcactgaaatgaaagcaaatgatggaagaaggattggtactgtatagaaacatttttagagaaatttgcaaaaatgtcagagaggaagtacagtatatttccataaagttatactgagtgtgcctgcctctattgccctcccttccacctcctccatctcctctgcctctgttacccctgagggagatgaccgacccctcctgttcttcctcttcctcagcctactcactgtgaagacaaggatgaagactttttttttatggagatggagtttcgctgttgttgcccaggctggagtgcagtggtgtgatctcggctcactgtaacctccacctcttgggttcaagcaattcttctgcttcagcctcccgagtagctgggattacaggcacccaccaccacgcccggctaattttttgtatttttagtagagatggggtttcaccatgctggccaggctggtctggaactcctgaactcaggtgatctaccctcctcagcctcctaaagtgctgggattacaggcctgagctaccgcacccagcaggatgcagactttttttgatgatccacttccattaatggatattttctcttctgtatattcgaagaatacagtatataaaacatatacaaaatatatgttaattgactttattttaacagtaagccttctggccagcagtaagctattagcagttaagtttttgggtgagtcaaaagttatacatggtggctcatgcctttattccctcccagcaatttggaaggccgaggcggatggatctcttgaggccaggcactcaagaccagctgggacaacatgacaaaaccccatctctactaaatatacaaaaattagccaggcgtggtggagactacagtgagctgagattgtgccactgtattccagcctggacaacagagcaagactctgtctcaaaaaacaaaacaaaacaaaacaaccccaaaaacttacactatacttttttttttttttttttttggtggagacagggtctcactctgtcacccaggctggagtggagtgcagtggtatgatcacaccatactgcatccttgacctcccgggctcaagctatcttcccatttcagtctccccagcaactgagactgcaggtgcttttcaccaagcccagctaatttttgtattattattattatttttttgagacagagttttgctcttgttgcccaggctggagtgcaatggcttgatctcggcttacctcaacctctgcctcctgggttcaagccattctcctgctgcagcctcccgtgtagctgggattacaggcatacgcaccaccatgcccggctaattttgtattctcagtagagaccgggtttctccatgttggtcaggctggtctcgaattcccgacctcaggtgatctgcctgtctccgcctcccaaagtgctgggattacaggtgtgagccaccacgcccggccaatttttgtattttttgtagagatggggtttcgccatgttgcccaggctggtctcagactcctgggctcaagcggtatgcccaccttggcctcccaaagtgccgggattactcagtctatacgtggattttgactgcattgggggatggggggtacttagcacccctaccctccacattgttcaagggtcaagtgtacttttccccttccaatctttacatcatttatttttctttcctaattgcactgtctagggcctctagtacagtgttgaatataagttttaagtttaggcatctttgtcttgttctgcctcatagggaggaagcattcagtcttttaccataaatatggtgttagcttagtattttcatagacatcctttattcttgatttgctgagtttttaaaaataaaataactattgcattttagcaaatgcttttttaacatatattgaaatgatcatatgattttttgcctttattctgttaatgttggcaaatgataattgatttttccgatgttaaaccatcttacatttgtgggataaaccctatattttagtgattgattatcctttctatattgtgggattcaatttgctagtctttgtaaagtatttttatatatacattcatgaggtggattgatttatagttttcttgtaatttcttagtctggttttggttgcctcagaacgatttggtgcttattcccttctcttctgttttttagaaaagtgtgtaaggccggaagtgatggcttatacctgcaatcccagcactttgggaagccgaggcaggtggattgcttgagctcaggagtttgagaccagcctggcaacatggcgaaaccctgtctctacaaacatttacaaaaaattagctgggcattatggcatatgcccgtagtcccagctgcttgggaggctgaggtgggaggatcacctgagcatagaaggttgaggctgcagtgagctatgatggcaccactgtactccagcctggatgaaggagtgagattctgtctcaaaaaaaaaaaaaaaaaaagtttgtggagaattgatgttattattatttttagagccagggccttactctgtcacccaagctggagtacagtggtgccatcatagctcaccacagccttgaattattttgcttaaaggctccttccacttcagtctccagagtatctagtactgtaagtgtgtgccaccaagcccagctaataataataataattactattttcgagacggagtcttgctgtgtcacccaggctagagtgcagtggtgcaatcttggctcactgcaacctctgcctcctgggttcaagagattcttgtgcctcagcctccccattagctgggattacaggtgcggcaccacacccgactaatttttgtagtttttagtggagatggggtttcaccacattggccaggttggtcttgaactcctgacctcatgatctgcctgccccagcctcccaaagtgctgggatcacagatgtgagccaccgggcccagcctatttatttgaaatagagacaggatcttgctgtgttgcctaggctggtcttgaactcctggcctcaggtgatccttctacttcgtcctctcaaaatactgggattataggtgtaagccaccatgcccagccctgtttttttttccttaaatgtttgatattatttaaatggtgtggctagaagctatgttgaaatgggccaaggaatgacagatatataaggaaatagatagccaggatggacaactttgagaattctggctatgaagagaagagaggatggttgctagacaggtgtaaagattgaatcaggcattaaagaaatacagttgttttcttgattgccattatgtcttttaaatttgcttctttgttacttaattctaatgcagatacatcaagaaatctggaatttcatgaaatacatagtactgggaatgaaccgcctttgttgattatgattggctacagtgatggaatgcaggtctggagcatccctgtaagtacacatgtggttgaatacctaaaacatacttcccagcatgttagcttatgtgaaatctgtagatactttttttttttgagacagagtctcactcttcgcccaggctggaatgcagtggtgcgatctcggctcactgcaacctctgcctcccagcttcaagcgattctcctgcctcaacctcccgagtagctgagattacaggcatgtgtcaccacacccaggtaatttttgtacttttagtagagatgggttttgccatgttggccaggctggtctcaaactcctgacctcaggtgatccatctgcctcagcctcccaaagtgttgggattacaggcgtgagccactgcacccagcatatgtctgtgtatctttataggataaattcctttcaatggagttactgagtcaaaggctaagtgcatttgtaattttgatatatgttttacattgcataatattggtcttattttgcatttggactcctacatgtgccttttttgggtgaccaaacataaaatgtcctaaatgaagaagaggcatgggagcagtgcatttgttgagatgtagtaaatactgcatattttggcttatttcacttatatttcattatttggcataatctaaataattatcttccagtagatgagtgggcttattatttttaattgagatggggtctggctgtattgctcaggatggtcttgaagtcctggactaaagcagtcctcccaccttggcctcccaaaatgctgggattacaggcatgagccactgcacccagctgagatgacaggacttctgttgtgtgattcttttgcagtcggaggctctgggccagtagaagttgaatttatacctttaataattgtattcaggaaacttgtttgaagccccatgagtatgtgtgtatgtgtgtttcagccagaatttttttctctttttcttttgggtgatattgttgctccttgaatgatgtataagcaaacatgtattacctcagatttaatggaagtcaggatattctcaagtacagaatttgacctcagtagtctaagaattactaaggaacaagcacattcacctttcaattctttaacattttttttttttttttttgagacagagtttcactctgttgcccaggctggagtgcagtggcgcaatctcggctcactgcaagctctgcctcccgggttaacgccattctcctgcctcagcctctcaagtagctgggactataggcgcccgccaccacgcctggctaattttttgtatttttagtacagatggggtttcaccacgttagccaggatgatcttgatctgctgacctcgtgatccgcccgccttggcctcccaaagtgctgggattacaggtgtgagccaccatgcctggccaacattttttaagttaaaaaaatgtttattttttgataagtcacttctgatgaagtttggtgttccattctgttctttttttttttttttgagacagggtctcactttgtcacccaggctcgagggcagtggcatgattgtaattcactctatcctccacctcctggactcaagcgatcctcccacatcagcctctggagtagctgggactacaggcacgtgccaccacacccagttaatttttaacactttaatggagacagggtcctactgtgttgcccaggctggtctcgaactcctgggctccagtgatcctcctacttggcctcctaaagtgtgggcattacaggcatgagccactgtgcctggccaattctattcttataattatcatattattaagtatctaagatgtgggattttttttttttttttaacttggctttactttgcggagatagaagaatcgtgctggtatgtcatgaaattagaagtattctttttcttttgacttttgggaagtgtagttgacatttttcaaggtccctcaatgttctttgtaattttggtattgttccaaaggcgtggagaaagtacttaaaatttggcagtgtttttttttcttacggagagaaatatttctaggttgtgataaaacaaaagggttttgtaaatgtaactttttcttattaatagagactacattttgcttcattatgctgtttgttgacagtactgaagacagaggaagttatacctttaacaagagggttgagcctgtgtgattaggggtgttgactggattgaacacattcctttggtggtattcaggttgttttaactgcccacttgttttggttataattggggatattaattttaatagtttaaagttaatttctgtttatctttgagtaattaaggtctttatttctccttatgcctagattatattttgagagacttgaataattttttttttgatagaattttctttggccaagtgtatattgttgtagtaccactatttcatgaattagggcctggtgtagaggctgacgcttgtaatcccagcactttgggaggctgaggcaggaggatcacttgaggtcagcagtttgagactaacctgggcagcacagtgagaccagccgggtgcggtggctcatgcctgtaatcccagtactttgggaggccaaggcaggcagatcatttgaggtcaggaattcgagaccagcctgaccaacatggtgaaaccccatctctactaaaaataaaaaaaaaattagccgggcatgatggcacatgtctgtagtcccagctactctggaggctgaggcaggagaatcgcttgaacccgggaggcggtggttacagtgagccaagattgcgccactgcactccagcctgggtgacagagtgagactctgtctcaaaacaaaaacaaaaacaaaaacacatagtgagaccttgtctctacaaaaaatttttaaaaattaaccaggcgtagtggcatgcgcctgtggttccagctactcgggaggatgaggcagggggattgcctgagcctgggaagttgaggctgcagtgagccatgattatgccactgcactccagcctgggtgacagagtgagatcttgtcttgggaaggaaaaaaaaaaaagacaatctgggaaaataagcttcttatatttcattgagctctcattatggtcaaagaggtttatatacatattatctcatctaatgtagaagttaccttgttttacaggtggtaaggtcacactgcttttaagaggtggaactagaatttaaacctagttctgtctgaattcaaattcaaagcccatgatctaagagctatacttcatcacttttcaaatgtgattgctaaagatatgacatgtgagtagttttgtagttaaggtttagtttttgtagaggtgaagggaattatcccctctccctctgaaataaattgacaatagactaatgggagaaaaagcatacacatgcatgagagccacataaaatatgagactcaaagaagggccaaatggctgaagcttacatagtgctctcttcataggggagaaggagatggaggaatgtcgtcagttttgagagttagtaaatcattctcaggaaagttgaatgggcccaaagagcagaaaattgtttctaagtgattcacttgggaagtgggacctgagcagagatgatagcctgtgacaaagtctgtctaggtgtggtgtcatttctcggttttccatcctgtaatttgagattaatcttctctggttgaagaaatttcagaaaggggagagggaggcaattgtgttccttctagaagagcttcaggaaagggaacttgagagagtccctccttgtgcttgtgagggagaagcaggagaacaccagaaagtccttggttctgaggacttctgaggccttttaatttcctttagctcaaaatgctcagcatgccaaaatgccagaatttggaatatcgttttctgagccccagtgttttcatttgtaaaagattagtatgtaccttcaaatactcatagttatcttttacattttactttgttagccattactctgtcagaacccttctgaaacttataaccattattcattacatgagcatatatgctagacagtggggagcctatgttggccaacctagaaaaaaatgactctcatggatctttatagtctgtaattaatacgattggccctctatatacgtgtgttgcgcatctgcagattcaaccaactgtggattgaaaatatttggaattaaaaaaaggatggttgtgtctgtactgaacacgtatagagttttctttcttgtcattatttcctaaacaatgcagtataacaattatttacatagcatttacattgtactaggtattataggtaattaagagatgacttaaagtatatgagagaatgtgtaaaggttatatgcaaatactatgccattttatgtaaaggacttgagcatgatggactttggtattcatgggtggtttgtggaaccagtcagcacagatgctgatggacaattgcatttgcatttgctttttttgtttgttgtttgtttttgagactgagtctcacgctgttgcccaggctggagtgcagaggggtgatctcggctcactgcaacctctgcctcctgggttcaagtgattttcatgtctcagcctcctgagtagctggaactacaggtgtgagccaccatgccaggctaatttttgtattttttttagtagagatggggtttcaccatgttggccaggctggtttcgaactcctgacctcaagtgatctacctgccttggcctcccaaagtgctgggattacaggcgtgagctaccgtgcctggcctgctttttaaaaatagagatgaaatctcactatgtcgcccagattggtcttgaactcctggcctcaggcagtcctcctgccgtggcctcccaaaccactgggattacagatgtaagccatcatgcctggccatatatttgcttttgagtaagtgtaggtgggcagaaaatcaacccctgtccaaaccttagcttagtttttgcttctagtatatgctcaggactccctcttgttgagtttaatataactgtcccgcggtggctcatgtctgtaatcccagcactttggaggccaaggcaagcaagttacttgaggtcaagagtttgagaccatcctagccaacatggtgaaactccgtctctactaaaaatacaaaaatggtggtggccacctgtaatcccagctactttggaggctgaggcaggagaattgcttgaacccaggaggcggaggttgcagtgagctgagattgcaccacggtactcttgcctgggtgacagagtgagactgtctcataaagacaaaactgtcccacctgggagtctcaggttaagaaaataagcatatcctggttaaacattttaaaaaattgtctattgaagtgtgtagatgtgaatggaacttagatgatgtctaggaatattattaattagagtcagctcaaaagcagaactgtgcagtagtttactgcccaatctctactgctttgtacatgacaccagctttcctagctttcctgagctgtcagagcccttctttcaacacaccagatgtaacatagaatgattgttatgtgggcgttccagataaacaaccccttttctcaaccatccctaacaatgttattgactcttttttggtgaggtaaatataggctttcttgcttaaaattcttaattaaaaaaatcaaaattatctttgtatatattttaaaaaccaaatagtttcgtgagattcaaatatgaaacaaatgaagttctgtactctttctctttctttttttttttttttttttgagacagagtcttgctctgtggctcagactggagtgcagtggcatgatcctggctcactgcagcctccacctctggggttcaagtagttctcctgcctcagcctcccaagtaactgggattacaggtgtgcgccaccacactcggctaattgttttgtaatttttagtagagacggggtttcaccatgttggccaggctggtttcaaactcctgacttcaagtgatctgcctgcctagacctcccaacgtgtatactctttctttcatcactctttcaaatctactagttattgtcattttagtatttatttcaattatttcaaaatatcatacttcttatttattttttattttgagatggagtctctctgtgacactcaggctagagtgcagtagcgcaatctcagctcactgcaacctccgcctcctgggttcaagcaattctcctgcctcagcctcatgagtagctgggattacaggtgcacgccccatgtccggttaatttttgtatttttagtagagatggggtttcaccatattggccagtcttgaactcctaacctcaagtgatctgcctgcctcagcctcccaaagtgctgggattacaggtgtgagccaccacaccccacctcaaaatatcatacttcttgaagttttttttctcccagtgttaagattgattggtgccatgaactatgaagttattttttattttattttatttttttgagatggagtcttgctctgtcacccaggctggagtgcagtggtgtgatctcggctcactgcagcctctgcctcccagtttcaagcagttctcctgcctcagcctcctgagtagcttgaattacgggcatgcgccaccacacccagctaatttttatatttttagtagagacggggtttcaccatgttggtcaagctggtctcgagctcctgaccttgtgctgtgcccgcctcggcctcccaaagtgctgggattacaggcgtgagccaccgcgcacagccacgaactatgaagatttaaacggtgttcatttattcagcacatgtctgggatatacaggggtaagcacaatagatgtggtctttgctgtcatggagctagtaggagagagagatttaaataaaaataaatggatatacaacttaagttgtaatatgaaaaaaagcatgacatgttaggacaaggaagtgacatataagctaaaaaatacttagggtaagactggaacaataaacactaaacagaggctctgagatgaaagcattcttttctccatagttagaaattgatttagatttcttaaattttttctctttaaagagcattgtagctgggcatggtggctcacgcctatactcccaacactttgggaggctgagggtggtgtatcgcttgaggccaggagtttaagagcagcttgggtgagaccccatctcaccaaaaccacaaaaattagggctgaaacagggggatcagttgaacctaggaggtcaaggctgcagtgacctgtgcaccactgcacgccagcctgggtgacagagcaagaccctctcaaaaaaaaaaaaataataataatattgagataaatatctttatggtcatataatttggagagatcaataaaagtaaggctcctaatagattttccaaattacattcttttccagccatgtcagttatacttaccccatatatttattaattctttcactcagcaaagatttattaattgtctattacatgccagactgtgttgaaggtgctgggacaacactgaacaaaacaaagtcattctctttgtggaatttccattctggtaggtggggaagatagataataaatatgtatcatgttagatggtgatagatagggtggttgttgttgctgtgggttgctcttttatatacgatggtctgggaaagcctctcaaagacccagtgacatagtggtgtgaagttatccatatgggtatttgagggaggaacactccaagccagtacaaacattctgaggtgcagaatatgtttctttctttttcttttcttcttcttcttcttcttttttttttttttgtgagacagagtctctctgtgtcacccaggctggagtgcagtggcgtggttttggctcactgcaacctccacctcccaggttcaagcgattctcctgcctcagcctccctagtagctgggactacagggatgcgccaccacgcctgggtactttttgtatttttagtagagacggggtttcgccatgttgtccaggctggtcttgaacccctgacctcaagtgatctgccttcccgggcctcccaaagtgctgggattacaggcgtgagccaccatgcccggcagaatatgtttcttatatttaagaacagcaaggaggcagtttagctggagttaggagagcaaagcaaagaataagagattatgtccaagagttagcagttggctagggctttgttttcgcccttgtaaggacatctaaaatttcaaatatacagcaaagttggacttttacggtgaaattacttatacccgccatctagagcagcagtccccaacctttttggcaccagggaccggttttgtggaagacagtttttccacagggtggggatagtttcagtatgattcaagcacagtaaatttattgttcactttacttctattataattgcattgtaatatataatgaaataattatacaactcaccataatgtagaatcagtgggagccctgagcttgctttcccacagctagatggtcccatgtgtgggtgatgggaaacagtgacagatcatcagacattagattctcataaggagcacacaatctagacacttcacatgcgcggttcacgttagggttcgcgcgcctatgataatctaatgctgctgctgacctgacaagaggcagagcttaggcagtaatgtgcgcgatggagagcagctgtaaatacagttgaagcttcgcttttgcttgcctgcttctcacctcctgctgtgaggcctggtttgtaaccagtacctggcccagggattgggggacccctcaactagaatatacccttaaaattttactatacttttttttttccagtttttttttcaggcaaccctcagaaccagaaggggttcatacagctgcctactgtactttgtctcacatccatcttattcattgcatttcagaggaaatgcaaacatcaacatgctttcccctaactacttttgcatgcatataattaactagagttcaatatttggttagtttttaaatttttttagacagagtcttgctctgttgcccaggctggagggcagtgatgctatctttgctcactgcagcctctacctcatgggttcagttgattctcatgcctcagcctcctgagtagttgggattactggcacatgccaccatgcctggcgaatttttgtgatcttttaaattttagctattttggtaggtgataccttgaggattcatttagcattaccatttccctgatgactaataatgtggagtactttttcatgtttcttggccatttatatatattttagcaattatttgtataatttttttgcccattaaaaaatttagttgtaggctgggtgctgtggctcacgcctgtaatctcagcactttgggaggccgaggtgggcagatcacgaggccaggagatcgagaccatcctggctaacatggtgaaacgcagtctctactaaaaatacaaaaaaattagccaggcatggtgacaggtgcctgtagtcccagctacttgggaggctgaagcaggagaatggcgtgatcccaggaagcggagtttgcagtgagccaagatcgcgccattgcactccagcctgggcgacagagcgaggctctgtctcaaaaaaaacaaaaacaaacaaacaaaaaaacttagttgtagaagccattggaggatttttgaatagaggtaatatcacttttaaaaataagaaaggtatgtgaagagcagatttgggtggaaaggtagtgagtttggttttaaatgtgtgaaccatagactgttgctggtccataaactggtgatagcgaatcgtttgttattggcagcaaaaaggtaaagtgcagaaaatgagagtaagcctttcaaaacctatagtattcgccagtgcacactatccaaacatatgtatatagtttacagaagtatcatttgtgccaacttttagaaaaatcaaaaaataattcgtcttttatgacaaacagtttgaaaaacactatcatcaagacatccagttggagaaggagtttttgatgagtatgtttagacatgcaatcatgtattattttatttcacacaaataacatttctgtgattattaacattcattttagcattatacattctttgtagtcatgagaataagatacagaattttcaaggaggagatttgaattgcaggatgaggagttgaacttattctttcagccataataatttggactcgttgagaatcttttggtaacatacattccaaaagctgtctgtaatattgattttgtggttgcagtgggatgaatagcaggagaaaagaaaaggttataaggctagttaggagtgaatttcaacactgtctaaatgttagatgttgagagcctgaactaagtttgttgttgtgagaggattaccaaaaaccatggtaagtggttagacgtttagaagagaagaaagttaaagatgtttccagagtcttgacctggggaccagtgctgcttagtatgaaagatggcatcattttagcagaaatagaatttgattattagacttacactatgttaaaaatcatgtaaagcaaaaattgtatagcatattgtcttataagtaataaagggttctcacttaaagtttcagtggtaaaagtcttctgatattttcgcatactttttgctatctgtttaaatggcaacttagttttcttttcttttcttttctttttgagacatagtcttgctctgtcacccaggctggagtgcagtggtgcaatcacggcttcgcttcctgggctcaagcgattccctcacctcagcctcccgagtagctgggaccacaggtgtgcaccaccatgcccaactgatttttgtatatatatatttttttgtagagatggggttttgccatcttgcccagtctgatcttgaactcttgagctcaagtgatcctcctgccttggcctcccacagtgctgggattacaggcatgagccactgcgcccagcgtcttatcttcttttgaaatgcttatttttttcttaaaaaatggagaatatatttattacatcacctaaaatatggcagttgtattgtgtgaaacagtatacagttggccctggatatccatggattctgaatacgtgcattcagtcaatatggatagaaaatatttgggaaaaaagtaaaaaataattcaacaataaaaaataacacaaataaaaatgacagtatagctatttacatagcacattgtattaggtattgtaagtaatttagagatgatttaaagtatataggaggatgtgcataggttttatatgcataggttatgtgcagataccatgccattttataaaagggacttaagcattggaggttttggtgtccacagggattctggaaccaaccccatgtgaatacagagagatgactgtattttcttttcaaaagttagtatttgtagtgttttcttggagctgtgtatatgcggtacttcaatgacctaacactaggtgtcgctaccacattgagctaagaaaagtgcggctgctccttgaaaggaaatttttgccctaaagctttttgtgtagtttttatacactaaaagctttagagcaaatatgcaagggcattcttgaggtaaatgccaattagtctactatttattagaggttgggtgccaatagaccttgccatgttaagattgttagccaggaaacagtttttatgggtttcatttgggagtaatataaagttagtgatttgggtacactggcaagcagagagaggttgaatatggatgaagtccagtgaaaaaaattgcctttgttgagaataggaccttattttgtttggtgcattctcttcttcctggaaagagaataggtggatccttagactgtagatacagtgggaggacattggttgttatggatgaataaaagcagaaatgaagagtaatactgaagtaatttctggaatttaaccatattggtggattaaaatatcttttcctgtagtatgtttcttaaagtatcactccagagaactcttgcatctgaaacttaatttttccctgtgtgcgaatagtggcgtgactcttgttgatttgacataggcagtagacattactgtgagtttgaaatttatcattgtaagttggactctttcttacttgagatctttttgatgattttctactctaaaacaatatattatttggacctaagctgatttataagtctgtggaatgcaatttttttctgataaatgttattgaatatacatacagtaaaatgcacaaatctgaagtgtacagactgaaaatatatatatatataaccttctaaccatcatcctggattaagatctagaatatttccagtacctcaaaagaatcccttgtgccacttccttggcagtactaccctctttccacctccaagtaaccattattctgctattctgacttctatcaccatagattctttttttctattcttgaatgtctaagaaatatggtcatagatttaaaaggtatgctcttatgttctggcttgtctcttaacattatgactgtaagatttgtttttatgctattgtgtgtaacattaattttgctgtgttgtatctatcatatgaatacaataaattttgaaaaatccattatatgactgatagacatttttgttcccagtttttgagtattattaataaagttgctctgaaaattcttatatatggtaatttttcatggatgtaaacaaaaaatggtaatttttggtgtacgtaaacactcatttgtcttgggtgttgacctaggcgtagatttattgtgtcataggataagtacatgtttaccttcagtaggtactgccaaatagttttcaaaagtgtttttgccaactttgtactctcaccagaattatgtggaagttctgtttgtcctgcatcctcagcagcacttggtattgtcagtctttttgattttggccattctgttgcggatgtgttgatatcttctgtgaggttttaaaaatgctttttagggggctgggtgcggtggctcatgcctgtaatcccagcacttggggaggctgaggtgggtagatcacgacgtcaagagatcaagaccatcctggccaacatggtgaaaccccgtctctattaaaaatacaaaaagtaggcaggcatggtggtgggcacctgtagtcccagctattttggaggctgaggcaggagaatcacttgaacctgggaggtggaggttgcagtgagccgagattgcgccactgcactccagcctggtgacagagcgagactctgtctcaaaaaaaaaaaaaaaaatgctttttaggctgggcacagtggctcatgcctgtaatcctggcactttgggaggaggtgggaggatcctttgagattagaagtttgagaccaccctgggcaacatagaccctgtcttgaccaaaaatgtggcatgtgcctgtggttccagcaactcaggaggttgaggggagaggatcacttgagtctaggagatcaaggctgtggtgagctatgatcacgttactgccctccagcctgggcgacacaggacacagcaagaccctatttcaaaaaatgctttttattttgcaataaatttcaaacttccagaaaattttataatgtatataaggtattcctgttactcattgtggagattcaccaattacggattttgccttatttgctttgtcattctttcagtctctgtatctatgcatatattttctgaaccataatttccataaattattattattatttttgagatggagtcttgctctgttgcccaggctggagtgcagtggcgtgatttcgcccactgcaacctctgcctcccgagttcaagcaattcttctgcctcagcctcctgagtagctgggactacaggcatgcaccaccatgccaaggtaattttttgtatttttagtagagacggggttttggcatgttggccaggctcttctcaaactcctggcctcaagtgatccagccgcctcggcctcccaaagtgctaggattacagacatgagccattcattgtgccttgcctgttttcataaattatttagtataatttcctacaaataaatatatagccatagcactgtcatcaagcccaggacatttaaatttgatgcagtagtattgtggaaactattgttcatattcaaatttcatccattgtcccaatagtctactttatagctattgttactttttcactttctttctttttttttttttttttttttttttgagatgaagtctcgctctgttgcccaggctggagtgcagtggtgcgatctcggctcattgcaacctctgcctcccaggttcaagtgattctcctgcctcagccttctgagtagctaggactacaggcacccgccaccatgcctggccaattttttttgtatttttagtagagacggggtttcaccatattggccaggctggtcttgaactcctgatcttgtgatccacctgccttggcctcccaaagtgctgagattacaggcgtgagccaccgtgcccggcctactttttcactttcttaaaattttcttttgatgaaaaaaatctggttccgattttttatcttttactctattattatttttgtatctttgtttactctaaggacatgcaaatattcttctaggctgggtgtggtggctcatgactgtaatcccagcactttgagaggccaaggcaggcgggccccttgaggtcaggagttcaagactagcctggccaacatggtgaaacagttcgctactgaaaatacaaaaattagctgggcatgatggtgtgtgcctgtaatcccagctgcttgggtagctgaggcgtgggaattgcttgaacccgggaggcacaggttgcagtgagctgagatcgcgccactgcactccagcctgggtgacagagtgagactgtctcaaaaaaaaaaaaaaaaaaaaaaggccggatgcggtggctcatgcccgtaatcccagcactttgggaggcggaggcggtcttatcacctgaggtcaggagttcgagaccatcttggccaacacggtgaaaccccgtctctactaaaaatacaaaaattagccgggtgtggtggaatgcacctgtaagcccagctacttgggaggctgaggcaggagaattgcttgaatccaggagtgggaggttgcagtgagccaagattgccactgcactctagcctgacaacagagtgagacttcctctaaaaaaaaaaaaaattcattttcttttagtgggttgttgtttttacctttaggtttaagattcattaaaaaaaaaaaaacagctttgtatatgtgtggtatgagatggggtcagggttatttcttttttgtttcatttccttttttgtagagacagagtctcactctgttgcccaggctggagtgcagtggtgccattatagctcactgcagcctccaagtcctgggctcaggtgatcttcctgcctcagactcctgagcaactagtactataagcatgtgccaccatgcccagctacttaaaaaaagttttttttgtagagaggggctctcattatgttacgcaggctggccttgaactcctggcccaaagcagtccatctgcctaagccttatttcttatttatctctatttttagaatagtgatactcaattgattcagcaccatttcctgaaaagaccattctttacccaattaattggaataataccatagatgtgtagtaattcttatactctattttttcattggtttaattgtctgcttttgaattctaaatatgctagaaactcaatctgagaaagtcccaaaataaacttcccaatttcttgctctttgctttaaatctattttatttccactctagcccttcttgctaacatctatatttttattagaatagtaccataatttttccattcagccacactgaaatgttcgggtctatgtcaagtattacgagatacaaataaagtaagatgtgagcattgtcttgaggcgataatttcctacttgggggaaaggtcactaaatatttgcagtctgtgtcagtggttcccgaccaggagtgattttgttctccaaggggccatttggctatttttttcattgtcatgattggggattgctgctggcatgtggtaggtagaagccagagatactgctacacatcctataatatacaggacagactcctcgaacaaagaattgttcagtccaaaacatcagtagtgctgaggttgaaaaaccttggtctgtgtgatcagtattaggatagaggtatgaatacagtgctgtagagcccccaaagaatgacaggatgcctgggggagggtttttttttctttttgttttttaatccaggatcagacctgagggagttttgttgttgttgtcattgttgttgtttttgagacggagtttcgctcttgttgcccagcctggagtgcaatggtgtgatcttggctcactgcagcctccacctcctgagttcaagcgattctcctgcctcagcctcccgagtagctgggattacaggcatgcaccaccacacttggctaattttgtacttttagtggagacagggtttctccatgttggtcaggctggtctcgaactcctgacctcaggtgataagaccgccttggcctcccaaagtgctgggattacaggcgtgagccactgctcccggccagagggaggattttttttttttttgagacagagtctcactctgttgcccaggctggagtgcagtggcacgatctcggctcactgcagcctccacctcccgagttcaagtgattctcctgccttagcctcccgagtagctgggattacaggcatgcaccaccactcttggctaattttgtatttttagtggagacagggtttctccatgttggtcaggctggtctcgaactcctgacctcaggtgatctgcccgccttggcctcccaaagtgctgggattataggcatgagccactgcgcccagccagagggaggaatttttttttttttttttgagacagagtctcactctgttgcccaggctggagtgcaatggtgcgatctcagctcactgcaagctccgcctcgcaggttcacgccattctcctgcctcagcctcccgagtagctgggactacagatgcccgccatcacgccaggctaattttttgtatttttagtagacatggggtttcaccatgttagctaggatggtcttgatctcctgacctcgtgatctgcctgcctcggcctcccagagtgctggaattacaggcgtgagccactgctactggccaagagggaggagttttaacacttgtgctgcctagtaaaatttcgtagaatatgaaaaaaaattgttataactggaatattcagaatgcaccatacattgttttaggcatattgcatatattatttattatcctgtcaattttactagttagtgttagtcttattttacacttgaaaaaattaagggctatatttaactaggtcaagttctttaacagataccttttaaaaaacagactttaaaaaaaaattatttatttattttttaaacatatcactgtatttattttctctcaggtaatttttctatggcttcaacattttctcttcaaaattaaaagaaaaatatcccaaagtttagaactggatctcttggccctttctcttcttatctcctcccggttcaaaatgcttacatctctgaatgaccaccatcctcttggatctgcagttaggctcaacacattctggccttagcacagtcttctttgtggtcttagccttcttcaggaaaactggccttctctgcccaccatagccactctgcttccgatcatagcgcctctttccctgggcatacaaggaatccttgctcttatactgtgtcactttgtgaggctgatgcttgccacacttcttacagaaggttcttcgggttttaggtacgttgaccatctttgcagcagggctgttccgtctatgtgatgaaaacgagaaatggcatctgagactctcgcctcgcaaagctctcgcctgacaggaaaggaaaaaacagactttatttttaagggcagttttaggttcacggcaaaactgagtagaaagtatacggaggtcccgtatacctcctgcctccacatcgtgcacaacctccccaactgtcaacacccccagcaccacagtggtaaaattgttacaatccatgaacatacattgatatattattgttacccacagtccatagcttacagtaggattcatttttggtggtatacttttttcctttttttttttttttgacacagggtcttgctctgttggccatgctggagtacagtggtgcgatcttggctcactgtagcctctgccttctaggctcaagtgatcctcccacctcagcctcctgggtagctgggactacaggtgcatgccaccatgcctggctaatttttctatttttttgtagagatggggtttcgccatgttacccaggctgttctggaactcctgacctcaagtgatctgcccacctcggcctcccaaagtgctgggattacaggtgtgagccaccgtacccggcctggtttttggtggtatactttctatgtgttttgacagataatataatgacaggtatccaccattgtaatatcacacagaatactctcactgccctacacatcctctgttctctatctattcatccctccatccctgataagccctgggcacccctgatctttttatcatgtccattcttttgccttttccatgtagttggaatcactacatggtaggtagccatttcagattggtttctttgacttagtaatatgcatataaggttctttcatgtcttttcatgacttgatagcttattcagatgctgaataatatttcattgtatggaataccacaatttgtttatgacagatacctttttatttttattttattttattttatttttgagatggagtctcactttgtcgcctaggctggagtacagtggggtgatcttggctcactgcaacctccacctcctgggttcaagtgattctcctgcctcagcctcccaagtagctgggattacaggtgcccgccgccatgcccagctaatttttgtacttttagtagagacggggtttcaccatgttggtcaggctggtctcggactcctgacctcaagcaatctaccgcctcagcttcccaaagtgctgggattacaggcatgagccaccacacccgataatatctttttaaaaataaagataatatacatactctgaaatgcacaaatctcaggtctatattttggtgatttttacttgtgtatatgtgtttgtatatatgtgtgtttatgtatgtctgtaagcatgcttgtgtgtatacacaagtacgtgaaaccaccattggggagaaaatgtagaacatttttgtactcataaaattttccagtcaatatttctcctccttccaggataagataatcactattctgaccccatattagttttgcatgcattgaacttcatataaacaggggcacacagtatgtactcttttgcatctgttctcttttgctaaatatactttttagattcgtctgtgttgttgctatatcatggtagtttgcattttttgtttgtttttattattgtgttttatttcactatttaaatataccataatctgtttagttattttctttttgatgggctttgtgtttctggcctttgcctataatgaataaagtgtctgtgaacattcttgtagatatgtggactctttttttttttttttttaagatacctagtgaaattgcttagtcacagggtaggtggcatatgtttaactattagaaattgtggccccatcacctccaaaacaaaaagaaattgcccaaggttttccaaataggctgtattgttgtatatttccatttgcagtatctgggagttacagttgttccactcactgcttacattgatgttgtcagtcattaaaaaaaatcatcttgttaatcttacaagttaatatgatagctattttatggaaaaaacttttagacttctatttaatataaacagtttctccttggttaattatctattgcaaatctatcttctttaatcaatgggttaaatcaagataggtttacaataccattaaaatgtaacaaattcagtcttttaaaagtggaaagaggcgatgaaccaaaattggtttatctgttgcactgctttctctcttcacttttcaattgaacacctatcagcttgtaataaaataataaagagaatccagtttgtatgtctgagtgattatgaagtgtttatgacagccgctaggccgacactctctataatggtgttacattgacttctgaacaccttctcgtctgcctccaggcgtgtgtgtcactgtagtctgagtggttttacattaacatctaccctgagtaagatcttttgactaccaaagtgttagttgcaaatggaagataccattaaggcggcttcaaaggactggaatgatatttggattggtgcatgctgaagtaatggctagagttttgaagtgtaatatctaaatcagtgttgcataactgaaggaacatgtgagttcaaacggcttttgtttgatcttcctttagaaaatcaggctgaaggggaaaggttaaagttgccttaaaacactcctttctatgtgtgcaaaaatctggaagtatgaaaatatgattacaagttccattcattatttgtgttctgtggttttcgtattgttcttgaaatttacttcctgcctgcctgaagttttgtattatgaatttagtgtcaagaccaaaatacagaccgggttgctgttttctttatgtggtcagcaaatatctgttctataagttgttactcctcacaaatatgcattttaggcgatttttatggcttgcattttttttcttgatggtatacacagtaggttacagagatactgacactctgatattaactgaatcatttgtggttaggcaggcaaaaaacaaaacaaaacaaaaaacttgttcccctcttcctcctaattttaggagctttcaaaaggactgctctttactattaggaaaactttcctcaaagtatgctatcttaagtttttaaaattgtggaggcagagctgtaaaaaataaaataatacactaacagtgacttgttagagaaaaaaaggcctgagtttaagaactattttgaatatagtgtatttataggagattctgatgcctctttgggctggttatttttggcagcctttttctttgtttccttatctataaaatgaaaatatattatcaaattggcttacagggtgttttgagggagagactgtcagctttcagtagagctggctctgtagttactgtggccactcatgtagctaggtgagttctttttgttgcttcttaaccgaattccttagtataagatgatacctgccatgcctcccacattctcctttacgtttttacaatttctccctaattaaaagtaaattgttattaatttttaagttaaaaaaactataatgaataaatcttctttttaaggaacttcattccttccagttgtatctgtatgattagtacatgtgaagtaattagcaaattgataactatacacgtgtttttttgcttgtttgtttgtttatttattgagacaaagtcttgctttgtcgcccaggcctgagtgcagtggcataatcttggctcactgcaacctctgcctcccagttcaagtaattctcgtgcctcagcctcttaagtagctgggattacaggcgtgcgccattacgcccagctaatttttgtatttttagtagagatggggtttcgccatgttggccaggctggtctcaaactcctgacctcaggtgatctgcccacctcaccctcccaaagtgctgggattacaggcatcctggccttaatgtgtatatttaaatgggttacgtgaggtgtttttgttgctttaggaactgaattccttagtagaagactttctttctctaatctgtatatttttaccttttatccttgattttttttcttcctattatggaagattaacatttatttgtgggattttaacattttctatatatgtttaaattaataggctttatttatttgagtagttttaggtttacagaaaattgaggtgaaaatacagagacctctcatgtatccgcttatcaccctcctattttttttttttttttgaggcagagtctcattttgtcgcccaggctggagtgcagtggcatgatctcggctcactgcaaccaccgccttccaggttcaagcaattctcccatctcagcctcccaagtagctgggattataggtgcttgctaccactgctaatttttgtatttttagtagagatggggtttcgcgatgttgtccaggctggtctcaaactcttaacctcaggtgatccgccagcctctgcctcccaaagtgctgggattataggtgtgagccaccgcgcccggccagccctcctattttcaactattaacatttgcattagtgtagtacatttagtacaattgatgagcttatattgacacattattaataactaaagtccttagattaactttttctccccaataggattttattggtgttactttttagctttttaaactactgatctttttaactactgatcttcatttgtctccatatggttagtacatgtgaaacaattagataagattggtaactctgcatttatatgtttaaatgggctatttttagatcgctggtagcaaggaaaacaagttgcaagtaaaaacatataaatagataaaacttagggagggtggagactggcttgatcttggatgagattatgaagactagtgtgataaaacctgctacatagacaagatgctgcttaccaccttggtagtagttcttttctccaaggctataaatcataggaagtaatgtattagtgagttcaagaactgggctgggtgtggtggctcacacctgtaatcccagcactttgggaggctgaggcgggcagatcacgaggtcaagagatcaagaccatcctggccaacatggtgaaaccccgtgtctactaaaaacacaaaaattagctgggcgtggtggtgcgcacctgtagtcccagctactcaggaggctgaggcaggagaatcgcttgaacctgggaggcggaggttgcagtgagccaagatcgcaccattgcactccagcctggcgacagagcgagacatcgtctcaaaaataaataaataaataaaaaagacctgagcactgagctgtaccaaaatatattcttcaatatggtattttaacaaatttctacgtattaaatattaatagcatgatttgagatcaggagagctaaggtacattatgctaaataacattaaggtagaatagtgagaccaatatagactgaatcattcattcatcaatttattcattcaacaagcatctctttggattaactatcatttattgagtgccaattattatatactatcaaatatacaattatacatttaacaaatatacaatttatatattgttgcctggttagataaatatgttattaaccttattttaaaacgaaactcagatttagtaaatttgtatagctaataagcatagtccattttcttttctactaaactgttagaatcattgattttgttgatttgtaaaatttgtaacagatgatctggtgtatttttcatattttgcattgttgtgataggacatgatttttggaataagaccaaaatgtccggggtctcaggtattggctgctcttgctccctctcttcccaggtgaaattagagcagttactaattcagaagactcttgacatgaaagatatttttgacagaaaggcaaaatgcactggagataaacatgaggcattcttttcctatgatcttccatgtctagtggccaattttaaatactggatgtttggttgggtgtggtagctgacgtctataatcctagcacttctaagagactgaggtgagatgactgcttgagcccgggagcttgagaccagcctgggcaactttgtgagaccccagtctctacaaaaaaatttttaaaaagttagctgggcatggtggcatgtacccgtggtcccagctacttgggaggctgaggtgggagaaatgcttgagcccaggaagttgaggctgtagtgagcattgatcacgccactgcactccagcctgggtgacagatccagaccttgtctcaaaaaaaatcagattgttttcttattgttgagttttaaaagttctttatatattttagataacagtactttatcagatgtgtcttttgcaaatgttttctcagtttatggctcggcttatgctcttgacaatgtcttttggagtgtagaagttttaaattttaaccaagtctagcttatttttttcttacatggatggtgctattggtgtatcaaaaaagtcatcactatacccagtatcatctaggttttctcctgttatttatttagtttgagagacaaagtgttgctctaatccccaggctagagttttgctttactacccaggcttctattacccagtaatgcgatcctagctcactacagctttaaactctgggctcaagtgatcctcctgcttcagcttcctgagtagctagggcaacaggtgcacactaccacacccagttaatttttagatttttagtagagatggagtcttgctgtgttgcccaggctggtcttgaactcttggcctcaagcagtcctcccacttcagcctcccaaagtgctgggattacaggtgtgaaccactgtgcccagactcctatattattttttgagttttagactttcgtgtttcacatttaggtctgtaatccatttggagttaatttttgtgaagggtgtaaggtctgtgtctacattcattttattgcatgtgggtgtccagttttttcagcactatttgttgaaaagactatcttggctccattgtattatctgtgctattatgtcaaagatcaattgactgtatttatgtgggtctatgaactctttgttctgtcccattgatctaattatctagtctttcaccaatactacactgttttggttactgtagctttaaagtaagtcttgaaatcagatagcatcagtgttctgactttgctttctccttcgtatttagttggctattctgaattttttacctctccatagaaactttagaattgatttgttgatagctacagaataacttgctttgattttgattgggattacattgaatgtatacattaagttggaaagaactgacatcttgacaatattgagtcttcctatccatgaatatggaatgtctcttcatttatttagttcttttttgatatgtttcatcagttttatagttttcctcatatagattgcatacatattttattagatttatacctacgtatttcatttttggtggcactaatgtacatggtaatgtatttttaaatttcaaattccacttgtttaatgcttgtatataagaaagtgacttttgtgtattaaccttgtatcctgcaaccttgctgtaattgcttatcaattccagttttttgttgaatcatttgtattttatacatagatgatcatgtcttctgtgaacaaagccagttttctttctttctttcccatttttataccttttatttccttttcttgtcttactgtattagctagggtcatgttaaaaaacctggtgagaggggacatccttaccttgttcctgatcttagtggaactgctttgagtttctcatcattcagtatgattttttattttatttattattttattgtattttattttatttttgagacagggtctcactctgtcacccaggcttgagtgcagtggcacgatctcagctcactacaacccctgctttctgagctcaggttatcctcccaactcagcctcctgagtagctgggaccacaggtgcatgccaccatgcagcactaatttttgtgttttttatagagacagggtttcgccatgttgcctaggcttgtctcaaactcctgggttcaagcgatccactcacctctacttcctaaagtgctgggattacaggttaagtgatgttagctggacttttttttgtagatgttctttaatcaggttgaggaagttcccttctattcctagtttctgaggagtttttttcttttttttcataaataggtgttggattttgtcatatgctttttctgcatctattatttgaccatgtgatttttaccgtgtagcttatcgatgtgatggcttatgttaagtgagccattaagtgagtgtaagtgagctattacattaagtgagccattcaacattttttgaaggttgaaccagctttgcatacctggtgtgaattccacttggttctttattttattttcagagacagggtctcacttcgtcacccaggctggagtgcagtggtgcaatcatagctcactgttaacctcaaactcctggactcaagtgatcctcctgcctttgcctcccaaagtgcttggattacaggtgtgagccactgtgcccagcctataattcttattatactttgttgggtttgatttgctagtattttgttgaggattttcacatctatgttcatgagagatattgatctgtggttttcttgtaatgtcttttttttttcttacaggcgtgtaccaccatgcccagctaatttttttgtatttttattagagacggtgtttctccatgttggccagggtggtctcaaactcctggcttcaagtgatccacccacgtcagcctcccaaagtgctgggattacaggagtgagccaccacacacagcctaacgtcttttttatggttccggtgttagagtaatactggcctcctaaaatgatttaggaagcattctatatgcttctgtcttccaaagagaatgataaagaattggtattatttctttcttaaatgtatggtagaattcaccagtgaattcatctggtcctgggtgctttctattttggaaggttattaattactgagtcaatttctttaataggtgtagacctattcaagttgtctatttattgttgtgtgagttttggcagattgtgtctttcaaggggttggtccatttcatctaggttatcaaacttgtgggcatagagttgttcgtaatgttcctttattatccttttaatgtccatgggatctttagtgatctcccctcttttccttccctccctccctccctcccttcctcccttcctcccttcctcccttcctccctcccttccttccttccttcctatttttgagaccgagtcttgctcttttgctgaggctggagtgcaatggcgcgatcttgtctcaccgcaactgctgcctcccaggttcaagcggttctcttgcctcagactcctgagtagctgggattgcacgcatgcaccaccacgcctggctaatttttgtatttttagtagagacagtgtttcgccatgttggccaggctggtcttgaactcctgacctcagatgattcacctgcctcggcctcccaaaatgctgggattacaggtgtgagccactgagcccagcctcccctctttcatttctaatattagtagtttgtgccttctctgtttctttttcaattagcttggctagagtcttaattttattcatcatttcaaagaaccagcttttggtttcattgatcttctctattgattttctgttttcaatttcattgatttctgctctattttgtattatttattttcttccacttactttggattcaatttgctcttctttttctagttttctttaaggtggaaggttagatttttaattttagatctttcttgttttataatatattcagtcagtgctacagatttccctctatgcactgctttcactgcatttcacaaattttcttaagttgtattttcattttcattagttaaacatgtttaaacatttctctggagctttcttctttgacctatgtgctatttagaattatgttgtttaatcttcaaatatttggttattttccagctttctatttttaatttctactttaataattctattgtggtcatttaatgatttctgttcttttattttttattttattattattattattttttttgagatggagtctcactcttgttgcctgggctggagtgcagtggtgcaatcttggctcactacaacccttgcctcttcggttcaagcgattctcctgcctcagcctcccaagtagctgggattacaggcatgtgccaccacacccggctactttttgcatttttagtagagatggggtttcaccatgttggccaggctggtctcaaactcctgatctcaggtgatctgcttgttggcctcccaaagtgctgggattacaggcgtgagccactgtgcccagcctgttcttttaaatttgttaaggtgtgttttgtggtccagaagatgccctatcttagtgaatgttccatgtctgcctgaagaatgtttattgtgctactgttgtaagaagtagtttatagatgtcagttatatccagttgactgatggtgctgttgagttcaactatgtccttttgtgcttttctggctgctggatctgttcgtttcagatagaggggtgttagagtctctaactctaatagtggattcatctctttctctttgtcaatttttgcttcatgtattttggtgctgtgttgttaagcacatatgtagtaagcaccgattaagtcttcttggggtattgacccctttatcattatgtaatatccccctttttccctgacaagtttctttgccttgaaatctgctctgtctgaagttaatacagctgtggttgccttcttttgattagtgttagcatggtatatcttcctacatcctgttacttttaatccctgtctttatatttaaagtggatttcttctatacaacatacagttggatcttgtgttttaatccgttttcacaatctctgttgtttgacatatttaattgatgtttaacgtgattattgatatagatggataaataactaccatatttgttgcccttgttttaatttttttgtatttttaaaagttttttcttgtgaaagggtcttggtcttctgcccaggctgcagtgcagtggcatgaacatagctcactgtagcctcgaactcctgggcttaattgatcctcctgcctcagccttccatgtagcaagccatcatgactggcaaattttattttttttaattgttgctttgtttttttctttttttatctttcatacttttgctgcttttttagtttgagcattttatatgatgttgtttcttacctttcttagcatatcatttttactacattttaaacttcttttagtgattgtcctggagtttgcaatacatttataaccaatgcatgcccactttcaaataacactatactgcttcatgggtagtgcaatacctaatattaacaaactattcataattctctcttgtttcttgtatcattgctgtcatttatttcacatatgcataagtgcatatatatacacacacaataccacacatatatacatacacatacataattgagtacattattgctattattttgaacaaactattatctgtaaaaaaatcagtaagaaaaataagttttgggtcaggcgcagtggctcatgcctgtaatcccagcactttgggaggctgaggcaggtggatcacctgaggtcaggagatcgagaccagcctggtcaatgtggtaaaaccctgtctctactaaaactacgaaaattagccaggtgtaggggcaggcacctgtaatacctgctacttgggaggctgaggcaggagaatcgcttgaattcgggaggcagaggttgcagtgagctgagatcacgccattgtactccagcctgggcgacaagagcaaaactctgtctgaaaaaaaaaggaaagaaaaataagttttatttcaccttcacttattcttctctgttgtttttctttccttatgtaaatctgagtttctgacctatattgttacctttttccctgtagaacttcttttaacatttcttgcaaggcaggtctaccagcaacaaattccctcggttcctgtttgtccaagaaagtttttgtcttttgtttttgaaggatgagttttcaggatacagaattagaggttgctgttttttttgtttttgtttttttttttccacacaacactctaagtgcttcactctcttcttgcttgcatcgtttatgaggaaaaggcaatgtaattcttatccttgctcttctacaagtagataatttttcctttggcttctttcaagattttttctttatctttgatttgtttgaaatttgaaaatggtatgccttggtgtagggttttttggggcatttatcccgcatgctgttttctgagcttaccagttctgattctggttctgatgcttgttgagtctcttcagattgtattgtttgccttttagtatgctttctaattttttgttaaaaggaagatatggtccatgtgtggtggctcacacctgtaatcctagcagtttgggagagtgaggcgggtggatcactgaggccaggagttcaagactagcctgggcaatatggtgaaacctcatctctacaaaaacatacaaaaaaattcagctgggcatggtggtgggcacctgtagtcccagctacttgagaggctgaggtgggagaatcacttgagcccaggggggccgaggcagcagtgagccgagatcatggtactacactccagcctgggtgacagggtgagaccctgtctcaaaaaaaaaaaaaaaaagaaaaaagaaaaaaaaggaggatatgatgtattgggtaaaaggaactatggtaaatgggacgttagtaattgagtggcggtgtgtggggagggaaaccattctacagtcctgtgggtaagttttagtcctttgtttctcattatttttttgagagtgtgtggtgtgttttttaacatcctcgagtgagacagaaaggtaagaggagattggatttgggtatttacctttccccaggtaggttaagctctgatataaccccagcaagttaggctctcataaagtagtttctgtcgaggccaggctttgttaagaacagaatgatctggtctggcatgtttcaagatggttccattttcacacccactgccagaggctcgaggggatttttattcagtattggctgttagagcctggtggagctcctggaggtaaaacacatcagtgtgagggcccctaggtctgggttcccctggaatttttactttttacaatttttaatttttacattttacaatgtcttgtccacattgaacctctagaaatttgtcaatcacagtttaggtgttcctaccttggtactgagtcctgaggttctcgcttgtggatttctgccctggtaaattgtgattctctgtatctgcctgtttgtctctccaatttttggggcagcagtttgctctatgacgtcatttttctgacggatgtaagaagagctgttcagctttttacctgtggtcagatctaagtgaagtcttctgagctgcatgtgttggcctggaaactgaaagtctgaatgttcacaaatcagtgtatttcagcttcgaaggacattgtgttgctagaacctaatcattgcaccttagtttgagggaaggattggtcattattgtatttggaattaagatatgaatttcattatgtacaaaaaaactctacttattccaagagctgcttaatcgagtccttgaatctcattaatatcctgtactatcatacctatctgtggtccttcaggacaaaagtcttacatcatctgccctcatggagggccattataataaagactaattatttatatatttactttgaggcagcattacatatccattggagactgatttatgcatttcagttaccatgcatctattgatttaaatccataatttttggacacctaccagaatggctgacactaaatattggctaggatgtggagcagatagaactcttgtacgttgctggtggaagtgtaaattggtacaatcacattggaaaattaaatctacaaaagatacacatgtgcctgccctaatatacagaagtagttactctactagatatatatccaagagaaatacatatacatgtttactaaaagacatttgtgagaatgtttacatcaatattctttattatgttgttttcaaaatggtaaaacagtgatctcatacaactatataagggacagatatcctgcattttttttaactcattgattagggatttgggatgttattatagctggttccaagaagaaggtgaatatcacagagaagcaattaggaatactgaaataaattttctaatagatacaagcttggttaatattctgttgggcactaaaatgtactgtttggaataatcttttctacagagtggaattcacttgtatctctaccagacaaaattcatttgcatttctgtgcacaagaatcaattgcattactatcagtttttgacagctcagagtattgtacagtagcccagtcaaagacaaagtgtggatcccctatagaatcagataaccccaaagggtctgctagagagctcttggtaatccatagaaaaaacacagaacacaaagtaatctattcagcatttcaaaatctttcacaattttccttgacatcttttttttttttttttttttttttgagactgagtcttgctctgttgcctaggctggagtgcaatggtgcaatctcagctcactgcaacttccgcctcctgggttcaagcaatcttcccacctcagcctcccgagtagctgggactacaggtgtgtgccaccatgcccggctaatttttgtatttttggtagagacagcttttcaccatgttggccaggctggtctcgaactcatgacctcaagtgttccacccaccttggcctcccaaagtgttgggattataaggcatgagctactgtgcctggcctccttgacatcttaagagctaaaaactagaagtaaaaaagtaaaaacaactcagaggtccatgaacagtagtacaatggataaaattgtaatattttcggccaggcacggtggctcacgcctgtaatcccagcactttgggaggccgaggtgggcagatcatgaggtcaggagattgagaccatcctggctaacacagtgaaaccccgtctctactaaaaatacaaaaaattagccgggcatggtggcacgtgcctgtagtcccagctacttgggaggctgaggcaggagaatggcgtgaacccaggaggtggagcttgcagtgagccaagatcgcgccactgcactccagcctgggtgacagagcgagactccttctcaaaaaaaaaaaaaaaaaatttgtaatattttcatacaatggaaatctatatagcaatacatataaaactacaattccatgcaacaacatgaattaatttcataagcatagtaatgtgtgaaagaagccattcccaagggtacatattgtgggaacccatttacattaagatgaacaagtagaacttaaagtaatagaaatcaggattgtagttatggccactcttgagttgggattatgactgaaaagagatgtagcaggaccttctgagtatccataatattctgtttcttgatgtcttttggttcagaggtacgttaacatttaaaattcatgttatacatatacttaggatgtatgtattttttctgtgtttgttacctcttgataaagtttgctaaaaaaaaaaaaaatcatttgtggaccacaaacatccatttaaccagtatctataggggaaagtggggttgtgaatgtgtactcttgtcctaataatgcagcattataaagcagtatttttattgtcttttggtatttgaattttctatattataattggtctatgaaaagtcatcagaagtttagaaataagtttgattctgagggcaagataaccttcatttgctttcagaattctctaaaagcacttctacagctctcccagaacttgtgtagccttttctgtgtgtatattattgtcttagctgttgtaatttccttttgccttagatcgagttgtgagattctaaacttgtactacccccaccccttttttggtttggtatgtaatttgcatattttcaccatgcgaaagctattttctatggttggaaaagattttttttcctacagtgtgaacaaatcattctttgttctccttattgtgcctccaaactggtacgtccggtttatgccccaaacaacaaaagtctgtcatcagaaattaaaatgccagtaagaacaaaggcagagaccatgaggagctgttggagaggctttctccctgttcgctcttctccccaagttaccacagttgccaggaagttggaatactgcttggactctctttccttgtagttctactcttgtatttattgctattgttggtttaaaagtgaacttacagtttagtatacttcttttcaggatctagaaaatccttatctctgccatttttaatgagctcttttcttaaaacctaaaaaatcactcttgacagccttataaaaaatcagttttggcacttatttgaaggcaaaattatcagtggacataatgtataaaattattattcagaaagatagctaaagcagaatctgtaaagactaaccatcctctgtgtgtcctttctaaaacgtatggatcatatctgtataaaccttaactctgtttctgttctgaaatggtactctaatgtagaattcccacagactatttggagagttctctcctcgaggaagtttgacattttgtgactcacataggatagtttagaattatgcttctaatttcagtaggttgtacaatcctgattttaatatattcagaaatatctataaatgtgacacaatgtttcctctgctccccccaacccccacccccgagttataattaaacacagatcctaggaccatagaggtaatgaagaatggacagtgaatgtggggatgcattttaaaatcagtccaaatgtttttttcctcccctcacccattgccttatgtgtaaggagggatttaagatacaagcttagaatagggcatttaggtttgttttgaaagctgttttgctgaaaagtgttgtatattcaggtttcaaaatgttttttgatgtcagaataagctcttgtgtattaaatacaatgatagcaaacttttatattgtgagtatgctaagacagatttgttttattctttttttttgaataattgagtacagcagctcatttaaatatggttacacttctttaacataaaggttttatttgataggaccaaaagctaaatactagaactggcatatgcaaataatagtacagagtggtggattttgttttagaatactataatttattataagtgtaaagtgagaagtatttttcattacttgaaatataatttcaatgtaagttctatggtattattttaaaatatattttttattttattaatagaaatagcaggtatattgggtaacacttatctgttacaataatttatttttaaaatgtaaatggcttggcagtgtttttattcttttggctattgttaaaattttaaaaggtaggtggaaatagccaataacacatctgtaatataattagattacattagtgttacaccttttagcatatatatgcttaaaataaaaaagactgtaatttttagatttcagagaatgtacgatactacattgcaggggaagttgaacaaataacctttgaagactttttctaaattttaaattttgttctataataataaaatgtggactataatggccatggtttttattctgaaaattaaaagttacaaaggaatttgtagagtaaataagttcttatagtttggaataatgagtttatagcttttacgtgtttcattggtgataggtggtgctattgttgcacagttagtcctagcattcttcacatctgcatcccaagtgctacagaaggatttcttgctaataaataatttgtagtaattatcataagcaaaatgaatgtgatagtcatttaggcgttatcacaacttaacattttaagaaacaaaaatatttgtagtttgcagctcttaaattcagatagaagctgaaaatctaaaaaagtagttactctaaaagagagctctgtagatttatagtaatattgtaagatttatacacttctaattttatcatgtatacatctttgatattttaaactgcttgtatggcaggcagttatttaaaaaaataccatcagtatgtttcctctattgaatttatatctttattacattggttgtaagttcttttgtatcttgaactagttttataatgtttgccattttctctgatagtgcatatttcatcaaacactaggcaattatgaaaatggtttaagaactacagtaccacgtacagtaatttaatctgtccattccccttccccacctcctccaaagataaactcgtagttctgtcagttgagatggaaataagaaagctattcttaactataatttaatctgctcagtgcttcaatgagcagtttgaaaagcagttgttttcacactcaacacatattaccatgcctctttaccttttgttcttcttttaaaaaaatttttatcccccacaaaatgtcctgaacataccctttaccttttgaattaatagaatgaatgactgaaagtgcttggatattcataatgtttgagctatgtgtatatttatgtgtataataaaaatgatgacttttaaaagttgtatatatatatagaattttttgttcatagaatattgaaattagaagtatcctggcagctttttttagcagcttttccttttcgttttatgattgtgaaagaatataggcttattgaggttacatgatttactcaaggttaacagacaattagttgcctaaccataagtatacctaagttattcacatttcacctacgtgttctttgcaataagtattgctttttctcatttacaacatatttgttaaagttgctataatatttaaggtgagattttcagagtagtattacagttgttttgttctcaaagaaggcagttgtgcaggaactgtacagatttctaatggtttaataagataaaaattatagacttccagaacagaccctttttttctgttcatatcaagtgtgtgctcttacagttttctaaaattacttgcagtaatttaagatatgaatatacttaacatgtatgaccaatgataaatgggtgtgggtgtatgtatatatatttcagacaaaatattgttataaaatttagaagatcttgtttttatataatactgttgtgaccttcattttcccactgaaatattttctttcttctcttatgcagatcagtggtgaagcacaagagctcttctctgttcgacatggcccaattcgagcggctagaatcttgcctgctccacagtttggtgagtgtagtccttaagaaaagaatctttcagaaaagagtttctcttttgttggtcttggactacaggcagcaagaatgataactaaagtctgttttcctccaagtgtccattccccttccccacctcccccaaagataaacttagttctgtcagttgagatggaaataggtaatcttaaccaattcaatatggccattcactttctgctgtggttttgatttatcttcatcctctttgatctcgatttagcctctgcctttgctggctctttcttgaagccctttttctctcttggttttcatggcatccttcttcccagatcccttcctggctgactgtgccgcctttgttatgtttctggcttagctttcttctgtgggtattcctcaagtctctattgttctcatgcctttgccctccttctcagttatacttatgccatggagagcttggttttcacttttctctgggctgtagatgactctactgtctgcatctacagctatgtcagaagtggagttttgggcttttaagcttgcaattctgctttaatagagaatacttcttaatgttgtgtttaaataatatatatgttttatatttatttaaaaaattcaaatatgtgtttgtattaaacttgctgtttagatggctaaataacgcctgactccttaatactttgagttttccaaaggtgttattctctcattacctttcctgtgttcactcaagcatgtttttgcatgtacagtgaaaacataatcataataatcatgtttggatactttaaaatcttcttaaaaagaggatattaaaatattttaattctattatattttaaaaagttaccagaagtgaaaaaaatcttataagacttcttgtagcagctaatcctctaaatttgtgagaaagatgtttttgaaaacttatgacattgtgattgtgtgtaaataatttagggattaatttagcaactaaatctgcctaaatgaaatgaggagggtggaggaaacaagcaacagtatcttgcagtcacatgtagattttctcccttgctattcaactctatggcatattctgatttcagctctttagctgtctctctgtttctttctcacacaattgattgtgctgtctctcgctctctcatgctctgtcactctctctcttgttctgttttttgttgcatttgtactttggtgaaatattttgataatgaagattctagaccgtccttttctagaagggttttggaatagccagctttctctttggatggctggaatcaaggaggactttattactaaagggctctgctgtttctctgtgtgtaattcacagacgcagatttttccctcttcatgttatttatgaagttattttgtttatgtgtattatcaatgttcatcttttctcaacttttaaggcagaaatatgtcttgaaaatatctaattaatattgctaatattttatttagaagtagatttaatttactttcctcttaaaaaaagattccttccttcactataatgtatttatttaaaaacatattgttagatttaaaatgtaattttatatgggtaagttttctgttatgatttgaacaaattacttgtgtagcttttattgtatttgattaattttttagatttttaaaaaagactagtcgagtgcagtagtgagaaggggggaaaaagtagaacaaggagttccatcagtaactgactgtaaacaatcaagaactcactaccttcggagcagccttttagatttttttcccccaaagttatacgtgcaaatgatcacataaaacttgtaatggaaaagagtaatacccacttttctcttttacccattttgctttaattcgttatggtggaatatgtagctttctgaaaaaggatgtgtgggagatattgtctgtctttattcttccttcactcttgattgattgtttggctggataacaaatacgtgtttataagaatgttacttcagaatttcgaaggcattggtgtaacattatgttgaagagtctgaggccattttgatacctttttctttgtggcttgttttactttctggaaatccatacaatgttggctttgttcccaatgttctgagactttgcagctttgtgtcttgattcacacattttcctggaccgttttaatttggaaatgcaagtctggtattttgatgaaatggcttcaatttttgttgttgatttcttccattgagttttcattgttcactctttctataacttgtattatctgggtgttaaatcccttgtactggttaattttttaaaattaatttctttcttattctttttttgagatagttccagtgtggcttactattacttctattgaacaattattttctgctgttatgtttttcttatcctatacttctcatatctaataccctcctcccttctttcttctttccctccctttcttctttcttggtatactttacatacaaataagtagcaaatagaatccaatgacatataaaaagaattatacatcaggacaaagtaagatttattccaggaatacaatgttggctaacatttgaaaattaatcaatgggatgggcacggtggttcatgcctgtaatcccagcactttgggaggctgaggcaggtggatcatgaggtcaggagttcgagaccagagtggccaacatagtgaaacctcgtctctactaaaaatacaaaaaattagccgagcatggtggccagtgcctgttattccagctactcgggagggtgaagcaggagaattgtttgaacttgggaggcagaggttgcagtgagccgaggtagcaccattgcattccagtcagggtgacagtgtgagactccatctcaaaaaaaaaaaagaaaattaatccatgtaatttactgtattagagtgaagaagaaaacctgtatgatcatctcaatagaagtagaagaaaactttgccaaatctcagtagccatttatgatttaaaaaagaaaagttttagcaaactaggaatagaaaaaaaattttctgaatatgataaaagttatctgctttaaaaatgtataccaagcatcatactcagtgttgatatattgaatgctttcctgctgagttcaggatgacttctgtcaccacttctatttattgtagttcctagccattacaataaggcaagaaaaaaaaataaaagacataaagattagaaagaaggatatgaaagtgtcgttattcatcgataacatgattgtgtacatagaaaatgcaatagaaccaacaaatagttagaattaatcagtgaatttagcagtgctgctgcatagaaggttctgtaaatcttttgtgaactgaatcccttcctgtgcatttttccagcatcacattctgccatccttaccctgtccccctcactagtcatcacaacaacattcccttgtgatagttgtactgaatttcttttatttcctcaaaagacccatcttcctgctttcaggtctgcttttgttatttcctcttctagaatacttatgtccttctaacccttcttgttccttatccactgtcagtagtgcatgctcccataggacttaatgttctttaattgttcatttgcctcttgtttgctacatttgcaggctgtttttatgtattcagtgtctcacagagtgctttatacaaggtattaataaatatttgttgaatgttgctggattgtataatactttgcaatttaagacgtggaagaaaaagtgaatcccctttctaaaggtatttctgtagaaagcctgtcccctaactaaaagtgagaaactgaaggatttggatgtcttcatatcccacagaagaccatcattgtatttaatgggcatttactcatgtcaacacagcttatgcatccctgcttcttcatggccactatcaataataattgattattttcttaatgaacctagatctgctttaggatttttttcaatacaatattccagaaagctatgactaattaattggtattatctcagataaaaactgttactaattatctttcaaatctgtccttccagaacttaattccaagtaataaatttttcttattcattactttaagtagccattttggcttttagtacctcacttttgtaataaaatgtatcagtatgtatattttaatatacaagtaaaaaagagactttcacttcctttaatatgtttttaatttgtttcttttttttctttttctttttttttttttttttgagatggagtttcactcttgttgcccaggctggagtgcaatggtgcaatctaggctcaccacaacctccatcttctgggtttaagcgattctcctgcctcagcctcccgagtagctgggattataggcatgtgccaccacacccgactagtttttgtaattttagtagagacagggtttctccatatttgtcaggctggtctcgaactcctgacctcaggtgatccacctgcctcggccttccaaagtgctgggattacaggtgtgagccactgcgcccagactgtttttaatttcttaaagtaaggaccatgtaattctaaccactgaaaatattgattattaaaaaaatcaagtaatactcaaatgtgggaaatgaaaatttatgtgagtctgtgttagcaaaggtaaatctgactgcttcttccttttcatccttcctcagatattgagcattgtaccaaaggcccatattaacagcatatatttctagtttttttccccttaactattcacacatgcataacactaacttatattattatgtcccaggactgattcagtttgtttatatgtattacatgtattggctgaagggtgtgtgtgtgtgtgtgtgtgtgtgtgtgtgtaagtgtaatatttttcataacgatttatagtgaacattgttttatttcagaacttaggtatttattttattattgctaaaaattatgtaacattgtattgtatgggtatttatattgttttttcccagttggttatgttgttatatacttccgtatatgtacatttaaaaaagtatacaaggaatttttttttaagggtaactcctaatggggaattgctcacatgtgtatttcatttttttttttctttttttgagacagagtctcactctgtcgcccaggctggagtgcagtggcgcgatcttggctcactgcaagctccgtctgctaggttcatgccattctcctgcctcagcctcccgagtagctgagactacaggcgccctccaccatgcctggctaattttttgtatttttagtagagacggggtttcaccatgttagccaggatggtcttgatctcctgactgcgtgatccgcctgcctcggccttgtgtatttcaattttgatgcatgctgtaaaatttcctcttagagagagtctaccaacatttatacatgagaatcccatttctccttattctgtcctatactggttattatgaatcttttcaatctttgcctgtctggatggcagaaaatcctattcatatgtaacttgaaagtgtttatttttagagacagtctcactttgtggcccaggctgggatgcagtggtgtgatcctagctcactgaagcctcaaactcctaggctcaagcaatcttcccaccacagcctcctgaatacctaggactacaggcacacgtcagcatgcctggctaatttttaaattttttgtagagtgaggtcttgccatgttgcccaggctagtcttgaacccctggcctcaaacaattctcccatctcagcctcccagtgctgggattacagatgtgacccattgtacccatatgtaattttttgatccttgattactagggaagatagaaaatcctcatatttttgctatttatattcattaatatcacacttgtttatattctttctcattgatttgagccctttactaggttattattaatctttagtttcatactaagaaaatccttctgtattttattatgcctaactttaaatcatgacttttcttgaaagtttaattaaaattttattttgttgttatttgtctcttattttatttatttatttatttatttatttatttatttatttatttagagacggagtcttgctctgtcacccaggctggagtgcagtggctcgacctccactcactgcaagctctgcctcccgggttcccgccattctcctgcctcaacctcccgagtagctgggactacaggcgcctgccaccacgcccatctaattttttgtatttttagtagggacggggcttcaccatgttagccaggatggtctcgatcacctgacctcgtgatctgcctgcctcggcctcccaaagtgctgggattagaggcatgagccaccacgctctgccgcgtcttcttattttattacattttccatattgttgatggtcaggaagtagttcttccttgccagtctctgattttcatagattttggacaaaatttctgttttattatggaatttctgttactataatcttagctttttggaatgatgggaactgtgtttttctaatatttgcattctatgcagtgacttgcataataataatatgtaccatatgaggggtaccacataatgaatttattcaatattttgtagacaataatctagaatgctactttgtataaagtgttgtttataaattatcagtgatcaaatgatgtgttttattttatttattttattttgagacagggtctctctctctcttgcccatgctggagtgcagtggcacaatcatggctcactgcagccttgacctcctgggctcaagtgatcctcctgccttggcctcccaaagtgctgggattacagtgtgagccgccatacctgacttctttttttcttttttctttctctgggatagaattttgctctgtcacccaagctagagaacagtgacgcaatcatggctcattgcagtcttgacctcctgggcccaagtgatcccccttcctcaacctccaagtagctgagaccacaggcgtgtgccaccatacctggctaattacggagtcttgctctgtcacccaggctggagtgcaatggcgtggtcggagatggggtcccactgtgatgcacaggctggtcttgaaccactggcctcaggtgatcctcctgcctcggcttcccaaagtacaaggactacaggtgtaatcctccgtgcctggcctgatgttttttacattaatagagcttataactcataagaattatgttagtctggtgtatattctgtttccttcctgctcctggagaaagacaatcattttggccttgaataatttcttagaaatgcagatgtaaaatttaaaatacacacacacacacacacacacacacacacacacacacacacacacacacacacacacacagagtctgttcagccgaaacactagcaagcctctaaaagtaggccaactgacatttgttgatattcctcaccagtctattgcaaagatgaggaaacaggcttattgacattttaaatggctaaactatgagatttagggcttctctaatgttttccgctctaattactgctcagtttgccttgtgtatttttaaaaataacacctagtctttattattgaggtcttactacttgtgatcatttaggtttttgcaatattttgctaagcctgtgatgtgattcaggtaaattgtaacttgagaacatatgttgtattcatcttaaatttctttaatgatttgggtcagagaacagtgtttctaggggagaatgtctggtttagaggtgctgctttttcagtttgatgatttcatggttttaggtataggaaattgatttcagaggattctcagtttatacctagctgaaccctgttattagggcgtttttctataagaggtatagagagaaatgtactgaacacaaaagagaggtgaattaagtgaactatataatgcttgatactcttcagataacattttaggttgtttgtatacattattaccacttttccactattcttcagggtgagtaccattatcctaattcacaggtgaggagacttaatgctcaaagaaattgacggttggtaaatggtgaaactgaaacttgtaatatcaattattatttggttatatagcacataatataaaaaagaagtacttcaaaaccctgttccctgaagatactctctgttaatctcttgttttatatcatttaagcctctttatacacacactccatgtacatgatgtgttttaaaaattgggattactatgtaatgtattttgtagctttttattaatttaacattattagttgagcattttcctgatattagatattcttcttttcaatatgcttttcaatagctgcataaattttcatcatgtggatttatgattacttatttaagcaaccttaacatttgttttcatttttctcctgttttttcaatttttaattttaaaaattgatacaaatattttacatgttatgcggtacttgtgaatatttcttacgtgcatagaatgtgtaatgatcaggttagggtattttaggtatccatcacctgaagtatttatcatttctatgtgctggtaacatttcaagttctctcttgtagctactttgaaatatataatacattgttgctaactatagtcatcctactctgctattgaatattgaggcttacttgttctaacttagtggccccaacctttttgacatcagggacctgttttgtggaagccagtttttccatggatggggggcgtggtgggggattatttcaggatgaaactgttccacctcagatcatcaggcattagttagattctcataaggagtgcacaacttagatcccctacatgcagagttcataatggggttggtgctcctgtgagaatctaatgccaccacttacctaacaggaggtggagcacagacagtaatgcttgctctcctaatgctcacccacaggccatgaactggtaccagtctgcggcccaggagttggggacccctgttctaactgtgtgtttgtacccattaaccaacctctctttatccaccccccttccatccacacattcttcccaggctctggtatgtatcatcctattctctgtctccatgagatcagtttctttagcttccacatatgagtgagaacatgtgacatctgaatttctgtgcctggcttatttgacctaacataattagctccagttccatccctgtgctgcagtgacatgattttattatttttttatggccacataatatttcattctgtatatataccacattttctttatttattcatccatcaatgggcacttaggttgattccatatctttgctgctgtaaatagtgctgtgataaacatgtgagtgcaggttatacagatttcttctcctttggataaataccaagtaatgggattgctggatcatatggtagttctatttttaattttttgatgaacctccatattgttttccacagtggttatatcagtttacattcccaccaacagcatgtaagagttcccttcttggccaggcgcggtggctcatgtctgtaatcccagcggatcacgaggtcaagagatcaagaccatcctggccaacatggtgtaaccccgtttctactaaaaatacaaaaattagctgggcgtgttggcgcgtgcctgtagtcgcagctactcgggaggctgaggcagctgaatcccttgaacccaggaggtggtggttgcaatgagccgagatcgcaccactgcactccagcctagtgacagagtgagactctgtctcaagaaaaaaaaaaggagttcccttctaaatacaaaaattagccacttggggggctgaggcagggaattgcttgaacctaggaggcagaggttgcagtgagctgagatcgcaccactgcattccagcctgggcgacagagcaagactctgtctcaaaaaaataataataataaataaataaataaataaataaataaataaatgagtttctctgcatccttgccagcatgtatatgtgtgtgtgtgtgtgtgtgtgtgtgtgtgtgtgtgtgtgtgttttcttttaatgatagccattctaactggggtaagatgatatctcattgtggtttttttcttgtatttccatgatgcttagtaattttgagcatttttcctgtatacgtattggccattaatatgtcttcttttgataaatgtctatgttgttaccccacattttaatgggattttaaaaaattgttgaattttttgagttctttgtatactctggatattagtcccttattggatgaatagtttgcaaatattttctttcattaagcaagttgtctgttcactctgttaattgtttcctttgctgtatggaagccttttagtttaatatagtcctacatgtatatttttgttatagttgtctgtgcttttgaggtcttagtcatgaaggttttgcctagacctatgtcttgaagtgttttccatatatatatatttagtagtcttactgttttaggtcttaaatttatgtctttaatccatctcgagttgatttttgtatatggggagagataggggttcagtttcattttatgcatatggatattgaatttccccagcaccatttattgaaggtcttttcccttgtgtatattcttggagtctttatcaaaaatcagttggttataaatacatggatttatttctagactcctattctgttccattggtctatgtgtctgtttttataccaatatcatgctattctggttactatagccttgtaatatattttaaagtcagatagtttgatggcttcaccttttcttttgactcaaaattgctctatttgggctcttttttgattctatacacatttgagaattgttttttctaattatgtaaaaaatgacattggtattttgaggtttattgattttgtttatctttttgaagaaccaactttttgtttcattgatactttgtattgttttttgagtctctattttatttagtttgccctgttctttattttttcttttattctgctaattttgagtttggtttattcttggctcactgcagcctccgccttccggttcaaacagttcttctgcctcagcctcccgagtagctgggattacaggctcccaccaccactcctggctaatttttgtattttttggtagagacggagttttgtcatgttggccaggctggtctcaaactcctgacctcaggtaattcacctgccttggcttcccaaagtgctggggttacaggcatgagccaccgcacccggccgcttttctagtttcttgaggtgtgtcattaggttgcttatttgaaagttttctacttttttgatgtgtttattgctataaacttctcttttagcactgctttagctgtatcccatatggttttggtatgatgtgtttccattttaatttgtttcaagaaatattttgatttctctcataatttcttcattgacccagtggttgttcaggagtatcctatgtaatttccatgtatttgtatagtttacaaaattcattttgatgttgatacttagttttattccactgtagtctgagaagattttttttttttttttggacacagtctccctcttttgcctggagtgcagtggcacgatctcgactcactgcaacctctgcctcccgggttctatcgattctcctgccttagcctcctgagtagctgggactacaggcacatgccaccacacccagctaatttttgtatttttagtagagatggggttttgccatgttggccaggctggaagatttcagtttctaaaaattcgttgaaacttatttaatggccttatatagtctgtcatggagaatgttctatgtgttgataagaatgtataaccagcctggcaacatagcaagtccccatctctgtaaagaaaattcgcagagtgtatattctgtagttgttggatagaatgttctatacgtgcctgttaggtctgttgggtctgaagtccagtttaaatccaatgtttcattgttgattttctgtctgagtgatctgtttaatgctgagagtggggagttgaagccccctactgttactgtatttcagtttatctctccctttagatctactaatattcgctttatgaatctggatgatccagtgttggatgcatatgtatttagaattgttacattctcttgctggattgactcctttatcattacatagtgacttctttttttttttttttttactgtttttgttttgtttcattttgtttatttttacagataaggtctcactgtgtcacctgggctgaagtgcagaggtgtgattgtagctcactgccaccttgaactcctaagctgaagcagtccttccaccacagcctcctgagtagctgggagtacaggtgtgcaccaccatgcctggctaacttttaaaaaatactgtagagatgagggtttctctgtgttgcccaagctggtcttgaactcctgacttaaagtggttctcccaccttagcctcccaaaacactgggattacaggtgtggccaccatgccaagccaaaatctgttttatctgatatcagtatagctagtgttgctcacatttagtttctatttggatggagtatcttttttccatccctttactttgagcctatgtatgtctgtaggcaaagtgcatttcttgtagccatcatacttgtatcatgtttcttttatacattcagccagtccctctcttttaagcagataatttaatcaatttacatttaaggttattaatgatgtgtgagattttgttactgtcatataatttgttttctgtttgttttgcatattctttgttcctttctctcccttatttgtgtgtttggtttaccagtgagttttatatttttgtgcattttcatgatagggtatgtgttattcttttactttcatgtttaggactcctttgagcatctcttgtaggcctagtctagtggtgatgaattcccccagcttttgttatcttggaaagactttatttctccttcattcatgaaggataattttgctggatatagtatccttgggtgacaggtttttttgtttttttttttttaaattttagcacttgcaatatgtcattcaattctctccaggcctgtagctttctgctgagaaatccgctgttggcttgatgggagctcctttataggtgactaaatgctttcacttgctacaccttaatattttctcttttgcttggctatagtttgactataaagtgccgtggaggaagacctttttgcattatatttggggatttttggacctcttatttgtgaaagtctaggtctttctcttgctagacttgggaagttttcatctaacattttgttaaataggttttctaaccctttcattctatcttcatccttatggataccagcatttcaaatatttggtcactttttgttgtcccaaatgccacaaaggctttgctcattctttttcatccttttttctttatttttgcctgactggattatttcaaaagaactgtcttcaagttctgagattcttccttctgcttgatcttatctattgttgcttttgaatatattttgcattttattcatataattcttctgttctagaatttctgttttgttctttttaaaaatacttatctcttttgtaaatgtctcagttatatcctgaattgtttttctgatttttctgtattgtttttcagaactctcttgtatctcattgagcttctttaaaatcagtattttgaattatttctctgggattttatgaatttttttattattatactttaagttctagggtacatgtgcacaaagtgcaggtttgttgcatatgtatacatgtgccgtgttggtttgctgcacccattaactcgtcattgacattagatatttctcctaatgctctcccgcccccatgcccccactccacgacaggccccggtgtatgctgttccctgccctgtgtccaagtgttctcattgttccacctatgagtgagaatatgcagtgtttggttttctgtccttgcaatagtttgctcagaatgatggtttccagcttcatccatgtccctgcaaaggacatgaactcatcatttttatggctgcatactattccatggtgtatatgtgccacattttcttaatccagtctatcattgatggacatttgggttggttccatgtatttgcttttgtgagtagtgccgcaataaacatacgtgtgcatgtgtctttatagcagcatgatttataatcctttgggtatatacccagtaatgggattgctgggctaaatggtatttctagttctagatccttgaggaattgccacactgtcttccacaatggttgaactagtttatgcttccaccaacagtgtaaaagtgttcctatttctccacatcctctccagcacctgttgtttcctgactttttaatgattgccattctaattcgtgtgagatggtatctcattgtggttttgatttgcatttctctgatggccagtgatgatgagcattttttcacgtgtctgttggctgcataaatgtcttcttttgagaagggtctgttcatatcctttgcccgcttttggatggggttgtttgatttttttcttgtaaacttgtttaagttctttgtaggttctagatattagccctttgtcagattgcaaaagttttctcccattctgtaggttgcctgttcactctgatggtagtttcttttgctgtgcataagctctttagtttaattaggtcccattagtcaattttggcttttattgccattgcttttggtgttttagtcatgaagtcttttcccacgtctgtgtcctgaatggtaatgcctaggttttcttctagggtttttatggttttaggtctaacatttaagtctgtaatccatcttgaattaatttttgtgtaaagtgtaaggaagggatccagtttcagctttctacatatggctagccagttttcccaacaccatttattaaatagggaatcctttccccatttcttgtttttgtcaggtttgtcaaagatcagatggttgtagatgtgtgttgttattctgaggcctctgttctgttcctttggtctatatctctgttttggtaccagtactatgctgttttgattactgtagccatgtagtatagtttgaagtcaggtagcgtgatgcctccagctttgttctttttgcttaggattgtcttggcaatgcgggctcttttttgattccatatgaactttaaagtagttttttccaattctgtaaagaaagtcattggtagcttgatggggatggcattgaatctgtaaattaccttggtcggtatggccattttcacgatattgattcttcctatccatgagcatggaatgttcttccatttgtttgtatcctcttttattccgttgagcagtggtttgtagttcttcttgaagaggtccttcacgtcccttgttagttggattcctaggtattttattctctttgtagcagttgtgaatgggagttcactcatgatttggctgtttatgtgttactggtgtataagaatgcttgtgatttttgcacattgattttgtatcctgagactttgctgaagttgcttatcagcttaaggagattttgggctgagacgatggggttttctaaatatgcaatcatgtcatctgcaagcagggacaatttgacttcctcttttcctaattgaataccctttatttctttctcttgcctgattgccctggccagaacttccaacactatgttgaataggagtggtgagagagggcatccctgtcttgtgccagttttcaaagggaatgcttccagtttttgcccattcagtatgatactggctgtgggtttgtcttaaatggctcttattattttgagatacgttccatcattacctagtttattgagagtttttagcatgaagtgctgtcgaattttgtcgaaggccttttctgcatctattgagataatcatgtggtttttgtctttggttctgtttatgtgatggattatgtttactgatttgtgtatgttgaaccagccttgcatcccagggatgaagccaacttgatcttggtggataagctttttgatgtgctgctggattcagtttgccagtattttattgaggattttcgcatcgatgttcatcagggatattggtctaaaattctctttttttgttgtgtctctgccaggctttggtatcaggatgatgctggcctcataaaatgagttagggagggttccctctttttctatggattggaatagcttcagaaggaatggtaccagctcctctctgtacctctggtagaatttggctgtgaagccatctggtcctggactttttttggttggtaggctattaattattgcctcaatttcagagcctgttatcggtctattcagagattcaacttcttcttggtttagtgttgggagggtgtatgtgtccaggaatttatccattttttctagattttctagtttatttgcatagaggtgtttatagtattctctgatggtagtttgtatttctgtgggatcgctggtgagatcccctttatcattttttattgcgtctatttgattcttctctcttttcttctttattagtcttgctagtctatcaattttgttatcttttcaaaaaaccagatcctggattcattgatttttttttttgaacttttttgtgtctctatctccttcaattctgctctgatcttagttatttcttgccttctgctagcttttgaatgtgtttgctcttgcttctctagttcttttaattgtgatgttagggtgtcagttttagatctttcctcctttctcttgtgggcatttagtgctataaattttcctctacacactgctttaaatgtgtcccagagattcttgtatgttgtgtctttgttctcactagtttcaaagaacatctttatttctgccttcatttagttatttacccagtagtcattcaggagcaggttgttcagtttccatgtagttgtgcagttttgagtgagttttttaatcctgagttctaattggattgtactgtggtctgagagacagtttgttgtgatttctgttcttctatatttgctgaggagtgctttacttccaattatgtggtcagttttggaataagtgcgatgtggtgctgagaacaatgtacattctgttgatttggggtggagatttctgtagatgtctattaggtctgcttggtgcagagctgagttcaagtcctgcatatccttattaaccttctgtctcattgatctgtctaatattgacagcggggtgttaaagtctcccattattattgtgtgggagtctaagtctctttgtaggtctctaaggacttgctttatgaatctgagcactcctgtattgggtgcatatatatttagaatagttagctcttcttgttgaattgttccctttaccattaagtaatggccttgtctcttttgatttgttggtttaaagtctgttttatcagagcctaggattgcaacccctgcttttttttgctttccatttgcttggtagaacttcctccatcccgttattttgagcctatatgcgtctctgcatgtgagctgggtctcctgaatatagcacactgataggtcttgactctctatccactttgccagtctgtgtcttttcatgggggcatttagcccatttacatttaaggttaatattgttatgtgtgaatatgatcctgtcattatgatgttagctagttattttgcccattagttgatgccatttcttcctagcattggcagtctttacaatttggcatctttttgcagtggctggtaccggttgttcctttctatgtttagtgattccttcaggagctcttgtaaggcaggcctggtggtgacaaaatctctcagcatttgcttgtctgtaaaggattttatttctccttcacttatgaagcttagtttggctggatatgaaattctgggttgaaaattcttttctttaaaaatgttgaatattggcccccactctcttctggcttgtagagtttctgctgagagatcagctgttagtctgatgggcttccctttgtgggtaacttgacctttctctctggctgccctaaacattttttccttcatttcatccttggtgaatctgacaattatgtgtcttggggttgctcttcttgaggagtatctttgtggtgttctctgtatttcctgaatttgaatgttggcctgccttgctatgttgggggagttctcctggataatatcctgaagagtgttttccagcttggttccattctcctgtcgctttcagatacaccaatcaaacgtagatttggtcttttcacatagtcctatatttcttggaggctttgtttgtttcattttactcttttttctctaaacttctcacttcatttcattaatttgatcttcaatcactgatatcctttcttccattagatcgaatcggctactgaagcatgtgcatgtgtcacgtagttctcgtgccatggttttcagctccatcaggtcatttaaggtcttctttacactgtttattctagttagccatttgtctaatcttttttcaaggtttttagcttccttgcgatgggttcgaacatcctcctttagcttggagaagtttattattaccgactttctgaagcctacttatgtcagctcatcaaagtcattctctgtcctgctttgttacgttgctggcaaggagctgtgatcctttggtggagaagaagcgctctggtttttagaattttcagcttttctgctctggtttctccccatctttgtggttttatttacctttgatggtctttgatgatggtgacctacagatggggttttgatgtggatgtcctttttgttgatgttgatgctatttctttctgttggctagttttccttctaacagtcaggtccctcagctgcaggtctgttggagtttgctggaggtccactccagaccctctttgcctgggtaccaccagcagcagctgcagaacagcaaatattgctgcctgatcctttctctggaagctttgtctcagaggggcacccggctgtatgaggtgtcattcggcccctactgggaggtgtctccaagttaggctacacaggggtcagggacccacttgaggaggcagtctgtcttttctcagagctcaaacaccatgctgtgagaaccactgctctcttgagagctgtcgggcagggacgtttaagtctgcagaagtttctgctgccttttgttcagctatgctctgtccccacaggtggagtctacagaggcaggcgggccctgttgagctgcggtgggctccacccagtttgagcttcctggctgctttgtttacctactctagcctcagcaatggcggatgcccctcccccagccaggcttactgccttgcagtttgatctcggactgctgctctagcagtgagcaaggctccatgggcattggacccgcagagccaggcacgggatataacctcctggtgtgccgtttgctaagactgttggaaaagcgcagtgtttaggtggcagtgtcctgattttcccagtgcagtctgtcacagcttcacttggctaggaaaaatcccccgaccctttgcgcttccggggtgaggcaatgccccaccctgcttcggctcgccctccgtgggctgcacccactgtctgaccagtcccaaccagatgaaccaggtacctcagttggaaatgcagaaatcaccaatcttctgcgtcgatcatgctgggaactgcagactggacctgttcctatttggccatcttggaactcagaagtccttttttttttttttttttttttgagttggagtcttgctctgtcacccaggctggagtgcagtggcgtgatctcggctcactgcaacctctgcctcccgtgttcaagccattctcctgcctcagcctctcaggaagctgggactacaggcatacaccaccactcccggctaatttttttgtatttttattagaaatggggtttcaccatgctggccaggctggtgtcaaactcctcacctcaagtgatccaccctcttcagcctcccaaagtgctgggattacagatgtgagccactgtgcccagccatgaatctttttttattggactctgttgctggaaaattattgttttcctttggagctttcttatttccttgctttttcatgtgtccagtgtctttacattgatatctgtgcatctggttaaatggtcgagttgcttcttccaatttatttatttatttatttacattctttagagacggggtctcactctgttgcccaggctggagttcagtggcgtgatcatggctcactgcagctttgaccttttgggctcaagggatcctcctacctcagccttctgagtagctggaatgacaggcatgtgccacagtacctggctagttttaaatattttgtaggaacaggatctcactatgttgcccagcctggtctcaaattactggcctcaagcaatcctgtctcagccttccaaagtgctgagatgagaggtgtcagacaccgtgcccatcatctgtgggtagggtgctttgactttgattttaggtgcatatattagtgtgagcactgtatgatttctttggttgtaaacaatatgagtggtatctgtgatttccttggtagctgtgatggttaatactgagtgtcaacttgattggattgaaggatgtgaagtattgatcaaggatgtgtctgggagggtgttgccaaaggagattaacatttgagtcagtgggcttggaaaggcagacccacccttaatctggatggacaccatctaattagctgctagcatagctagaatataaagcaggcagaaatacgtgaaaaggctagactggcctaacctcccagcctacatcattttcccatgctggatgcttcctgctgtcgaacatcggactccaggttcttcagttttgggactcagactggctctcctttcttctcaccttgcagacagcctattgtgggaccttgtgatcctgtgagttaacacttagtaaactccccttttttatatatctatctatctcctattctgttcctctagagaaccctgactaatatggtagctttgagtgcagttattagtggaggctgtggtgaaattttgctgggcagtaggacaccaagtgggtcattctttgtgttccagtggtggcagtaataggctgattgtgcttgtctttctgctccaggatggcttgcactggcaccagtgtcagcgggcctaggtggtctgattcttgggcctccagatagcttgtttagcagtggtgggccaggcatgtgggcagcttctcaggcccctggacagctggtatgagtggcaatagcaggggtggagcaatgcactggaacccaagtgatttatgctggtgttggctgtgacaagttaggcaggtctgtcctttgacttgatggtggtacatagtggtgggtgccagctctggtggtattggcaggttgtgttggcccaactggagaccccaggaggagtggtcaggtgccagtggtgatgtactgatctgggtgatttccaagtccgtggatgacatgctcagttactgtggggactagactggctggatgagtagacttgtccttgggccccttggtagtgcattcaggtgatgtctgtgataggcaggggcaggatggtccctagcccactggtggaatgctcaggtgttggcagtggtgtctttgctgcagtcctgccactgaggagagtgaggccactcttagtgggagcagtgtagggaggtagctgtgggatgtgtggttttcttgtgctctggtcatacaacagcctgcagtagcggaggtgggctttgtctttgaagcacatggaagtgcctggcctcatttctctccttggcctggtgctggaggcagcattagacctaaccctagccccacctccagccccaggggagttcaaagacctttggaggctggctgtgggcctgccgtggggaagggggagggcccccctcagtaggagcagctaggcaggtggttgtggggaatgcagtttgcttgtgctgttggtccacagcagcctgcagcagtggcagtgggatttgtccttggcgtgtgtgaaggtgccctgcctcctgtctctctccttggcccagtggcctcagggaagaacatagtcctttgggtttttaattttttttaattttttttttattttttggagatggagtttcaccctttcgcccaggctggagtgcagtggtgtgatctccgctcactgcaacctccatctcccaggttcaagtgattctccccattcagcctcctgagtagctgggattacaggtgcccgccaccatgcccagctaatttttgtatttttagtagagacagggtttcaccatgttggccaggctggtctcgaactcctgacctcaggataagcccacctcggcctcccaaagtgctgggattataggtgtgagccaccattcccagtccaagtttggttcttagaatggtgccaagctgcagctgttcagggcttgaaagcctgtgggagttcaagttctctctctgcagcaatgcttctgtgcagtctgtagtcagttccgtatgttagtcttgaggcctgtatgggtcaaggggttctcgtgtaattaggatcatgaaacactgtggtgggcacgtggagccttggggatctgtctcaccctttttctctgtccatgagctttccccagttcatagtccatcccagcttctctctccttacttgttacttgcttttagtccttgccatcgcctctctcatcccagtgttccctctttttttttttttttttttttttttttttttttttttgagacagagtcttgccttgtcaccaggctggagtgcagtggcgtgatctcggctcactgcaacctccgactccctggttgaaacgattttcttgcctcagcctcccgagtagctgggattacaggcatctgccaccactcctagctaatttttgtatttttagtagagacaaggtttcactgtgttggccaggatggtctcgatctcctgacctcgtgatctgcctgcttcggcctcccaaagtgacaggcatgagccactgcacctggccccagtattctctcttagacggtctatttgaagtgtgaatatttacttgctattttggttcctctctgtggaggaggtgcatactatctgcagtagtcagcgatcttgaacctaaaactgaaatttgtttttttttttttttttttttttttttttttgagacagggtctcactctgtcacgcaggctggagggcagtggcacgatcttggctcactacaacctcagcctcccaagtagctgggattacaggtgtgtgccaccacgcctacctaatttttgtatctttagtagagacagggttttgccatggctgctcttgaactcctgacttcaggtgatctgcctgccttggcctcccaaagtgctggggttacagcggtaaaccaccacgcccagcccccaaactgaaatttgtatttgaaagctcaccttacttagatctcatggtctcccagtatatggtttttacattacaactgagaaacgcttttaccacatcacatgatgtaaaaagtagcttcgtttctatttttttttcatttttaaggtctaaaatagcttcaattatttcagtgtcattattatatttgggttgtctagactaagggtgaaatgcaatggaaattgccggtatggagaccaatacgtagaaaagccgttctcctacattactacattttaattttaagttgtcaggataaagtatgttgcaaagacagcaatagtctacttaaatttcctttaccttaaatcaaatcaaacttttaaaagaaacgttggttccctttcacaaaacttggaataaactattaaaagtgcatcaaaaggattagtgacgggtatcttttttttttaattatactttaaattctagggtatatgtgcacaacgtgcaggtttgttacatatgtatacatgtgccatgttggtgtgctgcacccattaactcgtcatttacattaggtatatctcctaatgctatccctcccctgtccccctatcccacgacaggccccagtgtgtgatggtcccccaccctgtgtccaagtgttctcattgttcagttcccaactatgagtgagaacatgcagtgtttggttttctgtccttgtgatgatagtttgctcagaatgatggtttccagcttcatccatgtccctacaaaggacatgagctcatccttttttatggctgcatagtattccatggtatatatgtgccacgttttcttaatccagtctatcattgatggacatttgggttggttccaagtctttgctcttgtgaatagtgccgcaataaacatacgtgtgcatgtgtctttatagcagcatgatttataatcctttgggtatatacccagtaatgggatggctgggtcaaatgctatttctagttctagatccttgaggaatcgccacactgtcttccacaatggttgaactagtttatgcttccaccaacagtgtaaaagtgttcctatttctccacatcctctccagcacctgttgtttcctgactttttaatgatcgccattctaactggtgtgagatggtatctcattgtggttttgatttgcatttctctgatggccagtgatgatgagcattttttcacgtgtctgttggctgcataaatgtcttcttttgagaagggtctgttcatatcctttgcccactttttgatggggttgtttgattttttcttgaaaatttgtttaagttctttgtagattctggatattagccctttgtcagatgggtagattgcaaatattttctcccattctgtaggttgcctgttgactctgatggtagtttcttttgctttgcagaagccaattagatcccatttgagtgacggatatctttaaaaaggcttaacataggctgggcatggtggcttacacctgtaatcccagctctttgggaggctgaggttggtggatcactcgaggtcaggagttcgagaccagcctagccaacatggcaaaaccctgtctctagcaaaaatacaaaaattaactgggtgtggtggtgtgtgttccagctactcaggaggctgaggcaggagaatcgcttgaacctgggaggtggaagttgcagtgagctgagatcgcgccactgcactccagcctgggcaacagagtgagactcagtctcagaaaaaaaaaggggggcttaacgtgaagcaagtaagtttcatgtaagcttaatgattctgacccaaatttgaaaatgagtcttcaacttatttgggtaaatatcaaggagcatgcttttggcattgtatggtaaaagtatgtttagttttgtaagatactgcaaagctatcttccaaagtggctgtattgtttagtatttccaccagcaatgaacaagagttgtgtagcttgcatctttgccaccatttggtggtgtcagtgttctgaaatttgactattctaatagctgtgcattagtatcttgttgtttaaacttgcaattctctaatgacatatgatgtggaatatctttaaatatgcttatttgtcatgtattatctcctttattttgtattatctgactcttcaggtccttttttttttttttttttttttgggacagggtctcactctgtcaccagggctgaaatgcagaggtattatcatggctcgctgcagccttgacctcccaggctcgggcagtcctcccaactcagccttcccaagtagctgagactataggcaagcaccgccacatctggctgatttttgtattttttgtagagatggggttttgccgtgttgcccagggtggtcttaaactctcggactcaaaccatctgcctatctcagcctcacaaagtactgggattataggcatgagccaccacacccagccaactgttgaggtctttaacctattttttcatcaggtttttttcttattgttgagtttttttttatttattcttgagacagggtctcatcctgttgtccaggctggaaagcagtggcgtgatcatggctcacagttgcctctgcctcccagggtcacgtgatcctcctgcctcagtgtcccaagtagttgggaccacaggcgcacgccaccatgcctggctaatttttgtatttttttggagacaggttctcaccgtatttcccaggctggtctcgaacacctgcacttaagtgattggcctgccttggtctcccaaaatgttggatttacaggtgtgagccactttgcccggccttactgttatgttcgttgtgtgttttagataatagtcctttatcagataaggcttttggaaatatcttctacctatggcttgtcttcttattttctttacaatgccttttacaaaccgtattaaaatattttctttccttcctctgcatggattttagctcacttgatgtcgtttcacaactcactgatgctctgatcacttttgaagtctttccctcccctcttgttccagtagtttctattggtgcctcttcatgtttcttcatgttttttttctgcagtatctaatgttgttaacccatccagtgtatttttttctctcagacactgcatttttcacttacaatttgcgtgtacatgtgcatgtgtgtgtgcagagacagagatcttccatgtgcctggagacatgttcactttcctctccttgaataaatggaatatgtttatcataggaattttaatgtggttatctaatttgattctgttgattgatttttctccttattatgggttgtatctattcctgcttctttgcatgacttaaaatttttgtttggatgccacacattttgaattttgtgttgctcaggactattttgtattcctttaaatatttttggttttgtcctgggacacagttaaactacttggcaataattttattctttcaatactttctcttactctttgttaggtattcctagaatagccattagtctagagcaggggtctgtagacattttcttaagagagctagatagtattttaggcttgtgggccatctgtcctgactattccactattcatctctgccctattgggcaaaagcagccattgacaatactcaaatgaatgagtggtaagttggggcattcacagggctcacatcaattgtttcccttgtctcaaggatcactgtcctgggctgcgtgttgttggatgtctgaaactgttttttatatattttatctgtttcttaagttttcctggcaggagggtaaatctgatctgctgcagaggttcagcattttgccttagttccttgttttggatgacttaagagtgcttaggatagcgcttggcatgtagtaaaagtcctatgtgagtttttataaataaagaaaaaaataaatttcaaattgaatttcatttgtaagacagtttaaaaattttaatgtatctttggagaagttaagtttcaaacactttgaaagatgcaggcattatagagaaatttctggaggtatcatagcattaattgtggggttttttttctctcgggtgctagatgcagtagcaaaagaaagtgataaaaacaccaagggattcctttatttcttttgatctcatgaataggtaaaggagtcttaaactttccttctcctcttaactatcaacaagggactactatgattcttgcctttcagagtctggcatcatttttttctttccccatgatgcttttagtcttaacaacaagaagtgtgggcctccatgttatcatttaaactatctttttggcatctactgtttagtttaacctagttttcactgaatttttttctcttgttgttgttactgtactttgcagtttttatgtatatataggtttaccttgggaatatttcagaatttctttttttttttcatttgtagaacatggaaataatctaatttgaggccaagtgaatttatgtaaatttatagttagcagtaacaaccagacacactaataaaaaccttctaatattaaaagaaggaaaacaaaaaccgtgtgtgcaaaggaatgatccgcacaaattataggatactgactacctggcagtgggtagtagggtttgggatgtatgagtctatataagtaaatgaaagtttttggcagtgttttacttcttatggatgagggggtcataggtgtttattattaaagtataaagaagaggtccatgcattcattgagaagaaatgaaccaagaattatgaatggtctaattctttgtactcagtgctcaaagtggagaggagaaagatgcaaatgagagaaacagaacatgcagtctttattggattggaaataaaaaattagaattgtgaattagagattaaaagcaaagttttgagtgaagaatttaaagagagacttatttccctctgtatgggaaatacatacagtattttgccctgagaaattttctttgtataaagtcgtgcttcacagtttgttaatgttttaaattcatcataacagtattgactcagttttgtacttttaaagtaatctgtgtgtgtgtgtatagatgtatatgtatactctctaatcagaatgactccatatatagagctaatatcagctgttggtattttattcatatttttgaaaatgccagtataatatctcacattagttgtttaacctttatacattaatattagttttccaaatgtaactaatgtccttctttaacctatcttataacaatataagaacaaatggctgtgcgcggtggctcacgcctgtaatcccagcactttgggagaccgaggctggcggatcacaaggtcaggagttcgagactagcctgaccaacatagtgaaaacccatctctactaaaaatacaaaaattagccaggcatggtggcgtgcacctgtaatcccagctactcaggaggctgaggccggagaatcgcttgaacctgggagatggagattgcagtgagccgagatcgcaccactgtactccagcctgggtgatagagtgagactccgtctcaaaaaaaaaaaaaaaaaaaaggcatggttgctcacgcatgtaatcccaacactttgggaggctgaggtgggtggatcacttgaggtcaggagttacagattagcctgaccaacacagagaaaccccatctctactaaaaatacaaaattagctgggcgtggagttacatgcctgtaatcctagctactcgggaggcttaggcaggagaattgcttgaacccaggaggcggaggttgcggtgagctgagattgtgccactgcactccacgctgggcaacaagagtgagaactccatctcaaaaaaaaaaaaaaaacaaatgaagtaaagtatatacacatatatgtgtgtgtgcgtgtgtatatatgtgtatatatatatttcactgacgaaatggctaaaatcagcaagtatcaggaggcagctccgtgacttccatgctaccactggcagtagggaaaaaatggctgcagaactcttggtgtctttcccatcaccaccttattctcttcctctactactatacttaaaaaagctttgccactactgttatgagactatggccactaagttccttatgttctttactcttgtttacctcaatcaccacaacaaactcaaaacttggcccagcgtggtgcctcatgcctgtaatcccagcactttgggaggacaaggcagacaaatcacttgaggccaagagttggagaccagcctggccaacatggcaaaaccccacctctactaaaattacaaaaaatgggccgggtgtggtggtgggcgcctgtaatcccagctactcgggaggctgaggcatgaaaatcgcttgaatccaggaagtggagtttgtagtgagctgagatcatgccagtgcactccagcctgggtgacagagcgcgactctgtctccaaaaagaaaaggaaaaaaagaaacttaaaaactcacaggttatttctcattctcaccctctctccatgtggcattcacttttcaatctccatctctctcttcattcccccactctctgaaatacctactccaactccagaaactttctgacagggccccctcggaagtcattatccatcatctgcaaaatcccctatgtcctcatcctctttttggaatgttacttcctttctctttgttgctgcctttctttcttagttactacctttcagtttttggagattagatttttatctcatagttttctttagtaccactcctttcacaattcctaaaaatgaacatatttttatgtgttcatttgaaatccgtatgtcttctttggtgaaatgtcccttatgtcttttgctaattactgttgagtttagatagttctttacatactctggatacaagtcatttgttggatatatgattttcaagtattttcatttcatccatggcttatcctttcatcctttcagtttggatgaagtccaattatctttttttttttattttatcagttgtgcctttcatgtcatatctgagaacttagtaaatctgtaacactatggtctttagcgtctcttgtctagaatttgtgattttcctgtttatatctctctgcccttctcaaactcatttcatctcctctgaacagaatatatttttagttaattttataagagattattaaaataggttctattatatggaattcattcatatgcttgtttcaatttgtggtgcagcaaaattttaaattaataaaattattttctgtaattgaataaatccttattttcaaatgagaatagagataagactattccctcaggaatgatttgccacaaagtagtggaaatccatgcacacattattaactttgatggtctttttaaattctcatttgttagatattgtcattcctgggaaattggtgcttactgagcaagcagtttgtgttactcagcaagacttattttcctacagtctataaatctttaaaggaactagacagattcccaaaatttagaagtggatgtatttgatatctgagtggcataagtggctttaaatctctttataagatgatacatctaccatgtaaaaagatcagccctagtgtttgaccctgtagtagtattcttttggttgagtgttttattcatgtgtgttgggcatatgctataagtagcatatgattttgtgggatgataaaagtatagtttgtatacatattaacacatttttatagtaaaatttccttgtgtctgaagtattttttctaggcagatatttgaataaacatctaaacaatctttttttgcagtacactttgggttaatatggcattagtgttcttaatttgtcttaatgcagccttgcttctaaccacattgtattacaggttgagcattcctaatccgaaaatccaaaatccaaaatgctccaaaatctaaaatttggagcctgtttgagcttactctagctctggaggctgcctgctctccccacccccaaataaaacccccaaaacaaaattcagaactttttgagtgctgacatgatgccacaagtggaaaattccacacataaataacacaaactgtttcatgcacaaaattaacaaaaatactgtatcaaattaccttcaggctatatgtgtaaggtgcatatgaaacgtaagttattttctttcttttttttttttttttgaggcggagctttgcccttattgcccaggctggagtgcaatggcgtgatctcagttcactgcaacctccgcctcccaggttcaagcgattctcctgcctcagccttccaagtagctgggattacaggcatgtgccacaacgcctagctaattttgtatttttagtagagacagggcttctccatgttggtcaggctggtctcgaactcctgacctcaggtgatccacccgccttggcctcccaaagtactgggattacaggcgtgagccatcgcgcccggcagaatttcatgtttagacttggttcctatcaagatagcttattatgtatatgtaaatattccaaaagccaaagaagtctgaaacctgaaatgctcctgttcccaagcatgtcagataaggggtactcaacctataccattctctgagtttttctaaatcatgcaagaatggtatgattctgtttgagaaatattcttggtgctatttgatatatagacctttgaaaaacaggagataaggctctgatatgatcactggagcttggtgtctattgcaatatttttgggaaaatattcaaatatctaaaaaactttactatttttaatttttttttttttttgagatggagtctcgctctgttgcctaggctggagtgcagtggcgccatctcggctcactgcaagctccgcctcctggattcaagcgattcttctgcctcggctcccccgagtagctgggactacaggcacgtgccaccacacccagctaatttttgtatttttagtagagacaggtttcactatattggccaagctggtctcaaactcctgaccttgtgatctgcccacctcggcctgccaaagtgcttggattacaggcgtgagccaccatgccctgcctatttttttttttttttttaattttttgagacagtgtcaccctgttgcccagactggggtgcggtggagcgatctcgtgatcttgtcttactgcaaactccacctcctgggttcaagcgattctcctgcctcagcctccccagtagcttggattataggcacccgccaccatgcctggctaatttatctatttttaatagagacggggtttcactatgttggccaggctgatcttggactgctgacctcaagtgatccacctgccttagccccccaaagtgctgggattacaggcatgagccaccacacccaaccctaaaaagcttttttgtcatgttagtactttaggtaacttgtcgtacacagagatttattggtgtaaaagatagacctcttgatacgaatttttgataatttgtttggaaaatagttgtatctaagctgtgttgcagagcttcctattataaattatatcacagctttcttccttctaatttccaggctgaggtcctttttatccttctttgagttatggctaacatagccttacattttttgacatattttcctaagttaattgtagaatatctgtagatattttgttagatgtacatacagatatttaaattttgacgctttaaagtaatttgccaccatggttctgttttattttttgtcttttttgccatctttttttttgagatggagtctcactctgtcccccaggctggagtgcagtggcaccatctcggctcactgcagcctccaactactgggttcaagcgattcttgtgccccagcctctggagtaggttggggttacaggtgcgtgccaccatgcctggctaatttttgtatttttagtagagatggggtctcaccatgttggctaggctggtctcgaactcctgacctcaagtgatccccccgcctcagcctcccaaagtactgggattacaggtgtgagccgctacgcccagcttttttttccttttttttttgccatctttctcaaagaaagaattttccagctggccatggtggttcacacctgtaatcccagcacttacagaggacaaggtagaaggatcacttgagattaggagtttgagaccagcctggccaacgtggtgaaactgcatctctactaaaaatacaaaaattagccaggcatgttggtgcatgcctgtagtctctattactcgggaggctgaggcacgagaatctcttgaagtcaggaggcagaggtttcagtgagctatgattgtgccactgtactccagcctggatgacagagtgagaccttttctttcttctccttcttgtttttcttcttcatcctagactgccttatacttactcagatcacatttcttcttattgtttttgtcttatttccatgttttttcctctaccccttaaaacaaattttaaaagacatttttataaaaatgaattttacaattatgtgtatttctttacctatttttcataattccattttttcctacgttagttaataacagttgctatgtgcttctagacctatttctaggtgtgaatttcattttattctgctggagacttaccaagctttctggttctttcttttataattctggaaaattctctgtcatttatctctttgaatatcatgttttaaattcttcctgtcttctgtcattgtcctcaccatcctccacctagaaattcagcacaccagatgaacaactgagctagaaatcagattaactttcacaaaagcaaaagaaacctatacctgctacatagccattttaccttgaagactgaaaattaaggatgaccacatatgaggagtccagttattactgaggagatatgactttaaaaactacttttgtttatctgttgcattctttcaaatagcttgcagcacagtgtgagacctaataatggttgcttaataattgcctgctgtattgagtttataaagattttatgttattttaccaacttttaaacatcactttaagaattccttcattttatcttagtttatgataacagccactattttttgaggacttagtatgcttgaggtaggtagcatctccagtttgcagatgtggcagttgaccttcagaatgtagattacaaaccaattaattatgaaagccagtttggaaatccatgcctatctgatttaaaattccatgccctttctattttctatgttacttctgttcagatcaaatgttgtgaccagaaaacatgttagttggtctttataagttattattattattattattattattattattattattattttgagatggagtcttgctctgtcgccagactggagtgcagtggtgtgatcttggctcactgcagcctctgcctctcaggttctagcaattcacctgtctcagcctccagagtagctggggctacaggtacgcaccaccgcacacagctaatttttttttatttttagtagagatggggcttcaccatgttggccaggatggtcttgatctcttgacctcaggtgatctgcctggcttggcctcccaaagtgctgggaatacaggcatgagccaccgcacccagccagtctttagaaattctaaattaaggcttactctgtcatgccaattaaatttggggccccaaatgcatgcatacgtatatttacatatttgtgtacataaatataggtctttctagggactggaagggatgaatagccagagcacacaggatttttcgggcagtgaaaatatttgatatgctgatacatgtcattatatatttgttcaaacccacagaatgtatgcaactgcaagaatgaaccctaaactatggactttgggtgatgatgtgttaatgtaggttcatcagtttttcaatcaacagtttgtttgtttgtttatttatttacttatttttgagacagtcttgctcttttgcccaggttggagtgcagtggtgcaatcatagctcactgcagccttgaactccctggctcaagcgatcctcccacctcagtctgctgagtagctgggactacaggtgcacaccaccacatcaggttaatttttgtattttgtatagagatggggtttcgtcatgttgcccaggctggtctcaaactcctgggctcaggcagtctgcctgccttgggctcccaaactgctgggattataggcacgagccactgcgcctgacaatcaacaaatactgataatgtggtagactatgtctgtgtgtggcaggggctatgtgagagatctctgtactttcctctttattttgctgtgaacctaaaactgccctgatgaaaataaattctttaaaaacaaacaaacaaaaacatctattttaagcatcttaacatttttcataatacagtattcctcataatagctacataacagttttcccatcattaacttcttatttgcctttttttcctgggcatatttgttctaaatgaaatgtactccacctcacagttatatacagagtttccacattagtataaactatgagataatgctacaggtttgatttgagactctttttgtttgtttctcatgttgtaatattctctttgacttctctggagttctttatgggcagctgtagtgaacaatgagaattggccacataaagtttccttaaatatgggaaggtaaatgagatgtggctggccaaacatagaaatgaagtataatataaagcagcactccattgtagaactgctgccaggaaagtatctaaacatctggaatatggtcagaattctatattaaataatgcagtccaagcatgtactgtatctaagttaaaaaactcttatattgaagatgttaggcatcttatctaaaggagtgcagcatttatactttgggaatacgcaggaaagaaagggtctatatgtaaaattaccaaattgaaaaaaaaaaggtgaaaatacttagtgatgatggcgtgtgttctttctaaaaaaatgaaacaaatttttttttttttttttttttttgagacggagtctcactctgtcgcccaggagggcagtgacacaatctcggctcactggaagctccacctcccaggttcatgccattctcctgcctcagcctccctagtagctgggactacaggtgcccgccaccatgcccggataatttttttttttgtatttttagtagagacggggttttaccatgttagccaggatggtctcgatctcttgactttgtaatctgctcacctcagcctcccaaagtgctgggattacaggcgtgagccactgcgcccagccaacaaaaaatgtttttaaatgaggtggagtctcactgtgttgctcaggctggtcttgaactcctgggcttgcaatcctcccacctcattctttcaagtaactgggattacagatacatgctactgtgcctggttatgagaggaatgtttattttaaaagcgtttctggaaagtaactcagcaagcaatatttagtaaattaaatgtagctaggccaggcgcagtggctcacgcctgtaatcccagtactttgggaggctgacgtggatggagcacctgaggtgaggagtttgagaccagcctggccaacatggcaaaacccagtctctactaaaaatacaaaaagttagctgggcgtggtggcaggcgcctgtaatcccagctgcttgggaggccaaggcagaggcaattgcttgaacctggggaggcagaggtttcagtgagctgagatcgtgccattgcactccagcctgggcaacagagcgagactccgtctcaaaaaaaaagtatctagcaatcccaaacatgcccttttaacttaggagtttttactttttttcttagttttttattttttgagacagagtctcattgtcacccaggctggagtgcagtggtgcgatctcggctcactgaagcctccacctcccagggtcaagtgattcttgtgctccatcctcctgagtggctgggattacaggtgtgtgccaccatgcccagctaatttttgtaattttagtagaaatcgggtttcaccatgttggtcaggctggtctctaacccctggccttaagcaatccacctaccttggcctcccaaagtgctgggattacaggaatgagccactgcgcccagccagtagtttcccttttgaaagtctgtttcatatgaacagaagtactcgtacattaccagaatagagtatttttaccaggatgtttatagtcagacagcctgaatgtacatcagtaggaatggtcaaataaattgttacagccatattatgcaatattatgaagcgattaaatactgagttaggtgtatatttgttgacctgaaggaatttacatgaagtattgagtgagaataataagatacagagcaatgtgtacactgtgatcccattttgtaaaacagttatctaaaaaataaaaaatctctgctgtatttaacagcagtcagctctcagtatctgtagtttccacatctgtggattcaaccaactatggatcaaagatacttagagaaaaagttgtgtctgaactaagcatgtacagactttcccccttttcattattgcctatacaatacagtgtaataaccatttacatagcattcaccttgtattagatattataaataacctagagatgatttaaagtacacaggaggatgtgcataggttgtatacaagtatgatgcaattttatgccagagacttgagcatctgcagattttggtatctgagggaggtcctggaaccaatcccgcacagataccaagagacaactgtttatgttttattcaggattgaattaccacggataaaattatgtcagtaatttcagggtattaatattgtttacttggacatattggtagaatgtgagaatatatatagtatgagggagcccggatagttcagttggtagagcatcagacttaatcagagggtccagggttcaagtccctgtttgggtgtgtccttcggcttttagcacctaattctgattccacctttgaaaaagaaagaaagaaaaaaagtattgttttagctgggcatggtggtgcacatctgtagtcccagatactcaggaggctaaggtaggaggatcgcttgagcctgggaggttgaggctacagtgagccaagattgtgcctctgcactccagcctaagtgacagagcaagactctatctcaacattccccactgcctgcaaatgtgtatatatatatatatatatatataaaatgtgtcagtggaaatctgaagtataaaatctatgtatattactataaatatgtaaacattttagtatgcttattggcaagactcatgaacgttaattgactttggtatgggagcctgcatgattgtgcccatgtttgcagttcagcaattgaaatgaaaaagagatcagttgttccaagtgcttattctgaggttacttgtttttcagttaacatttctctggaaagaccagactacaaatggtaaaagctctatgttttattatcgacaatcccttttaaagttgaagtaattaacatttggagtgaattggattactttttattctaatgtgtgtgttttccaactttttattttcaaaaagttcaagccttcataaaggtagaaagcataggataataaacacctacatatccttcacctaaactgattattaatattttgttttattttggataaaaaggaacaaaagctcacctttttttctcactaccctaatcagccactgttaatgtcatgcaaacagtttatattatttgccactaaacatatttcttatttgcttaaattttttaaatgaaagcataatttatggtagataaatacacagaattatgtgttgtagtttgagttttgacaaatgtgtatacagttgtaatctatacccctgtaaagatagcatttctgtcacctcaggaagttctcacatgtactttcccagtcaccctcatctctaccagtagcttctactgctctgttttcttttgtttcagagagttttccctgcttttgatgttgttgcatacatcaatatatctttcctttttattgctaagtatatttcattatatgaatataacaagttatcagtttttctgctgatggaatttgggttggatattgctttgagttattatgagtaaagctgttatgaacattctcatgcaagtctttttgcatcatagagttaacatttgagtatgctgagcaaataagtaaatcaacagtatataatgtgcacaatatgaggttctgttaagtgctgtgaagaaacaaatcagggtaaggagatagagtaggagggaggatggtttccagaaacaacttcctgattaagagatactttagtaaagacccagaaaagtatacaagtggactatgcagatcactaggagaaactgtgtatttccaaccagagaggaggaagtgcagcattactgaggcaggggtgtgtttgacatactccagtatgggtgcagagtgagcagtgtggggaaatgttaaggagatattggcaccatggtaagaagagcaagacaggagtcaaggacatgaatagtacctttttttttttttaactagaaaagttaaaaaaaaagatgaatggtttcaccatagtagagttgccagaaacaacaaaatttatataaagtttgagttctcatatgttgcagcaccatgctcagtgctttgcgtatattatctttttacaacagtactatgtggcgtattggtacttatccccattttacagatgaaaggattaaaacactaagggattaaatgcagacgcctttatcaataattttgtttacaattttcagcagatgagttgatcattaattttttttgacagtagctttttcagtgagtaagggtaacagaaaagaattcttgtctagctttaaggttcatacatggcatttagtactacaagaatttggacaagttatttaacctctcaagatcactttactcctctataaaatggaagatttgtgtttggtgctttttaaggtctgatgagtctaatctgtgaaagagcacagggagctgattatcaaagtgaaatagaaggtaccattaaaggttaagggatacctcatatatttaaccttcaaaaaatactgtctttaatatagtttaataaactttttgaagtcactgtggaggctaaaatgtgcacacatattttagatatttgagggaaatggcaaagatgtctttggtgatcatatttagttgaaacaattcaaggtaatatgatttatgtcttgtttttccttttttgtgggtttgttgatggtgcctggagcctctctattttcctatttctccctctttatctcatcttccacttcatctctcttctctgtctcaaaaaattgctcacaagttcctgtttagataaatgagagtattattcaattcataatgattatttatagaaaatttggtaagaaaatagaattttgtagcgcacaacaaccttgacagaatctaaaaatttacatataaaatgtattggcaatagaataaaactttatggataaaatttagatttgcaaaatttgactataccttgaaagctcacattgagtgaatatataagttaatctcaacaaggacaaactaactgaatcaaatctatcttaaaaatgatttcagtaaaataaaaaatgaagcagaagacttggaaatggtttaaatgataaatttagttgttcaatggaatccttctagaaaatatttttctcagtgaaaattgattagtttcagcatacttttgcataaaatcttcacattgaagacataatccttaacatcaaaagagaagagttgagatatttcattatcagttggatttttatttgcctctgggtctatttttggacccaggcagaagctgtttctattttatgtcttgaaaaatccttaaggctgatttctgagcttaaatcctttggtttaaatgagtttacaatggtgtgtgtggtgggggatattatttaacattttctgacaaggaaacgcttttgaattttgttgcgtgggagaggagttggtgacttggtgggcaagcccattttcattactttaattgtgcgatttattaggattttaagctttttataaatgttttagtgttataggacagaattaaaaggatttagcataaaaggagtttaacaaaaggactttgcaacaggattgcaatagtttttatatttgatggatttggctagccgcttttcatttcaatcatcatggtacattctgttaaatgctgtagaacaggtgtgtgtaacgtcattctctctattgtacatgcaaataaacacacaattttatatataaaaagttaatccactgcaatttggaggattatgttatgggagggtgatgactccattaggcatcatgaagaatgaagagtacatgctatttatactgcaggaaaaaacaagttaatagctacaatgttcatgagatgtagaatttttatgtggacacttttattcaagatatccacaataaaattatttaaatgaaaattaagattttgttacattgttttctaaccttgaaatgagaatattttttttttctggatggtctgccttatataaagttggaagtttagttagtatttgtttattgtagattgtggtgttttctacttgcatggactttctagtaaatgtgttgggagttattgccattctcagtatagggcttttattttgtagtttaaaattttagcttctttgattatccataaactttataaatttttagtaagtattatgtgcctgatctagagagcaaagtttgctggactgatatacttcagtaggttagtgaaaactactggagttcttcaattcaggtttgagaaaaacaatcacaacattcttgccagtattatttgcattttaaaaacttgatgtttcattgatcaaaatatcaaattgatatgcataatacaggtacaaactgtaaagaccttggaaagaccaggaagtagaaggaaaatagccattgttaaaggtgaaggcaaaatatgtaggagtgaagaattggctctgtatagaggaagttcagttataattaatttggaacataaatattatggactgtgggcctgttaatttttaacttatgcttggatcaaaagtaatattgttaactgtgaaatctgatttgtttagcaggagtaatggcacaccatgtacagtaaattatgtttgaacaaacctattcttgatgctttctcactacattatcacagatttgtttaaaagatataggcactgattattatataattctaaaatatttaaataactatagttttattcataaacattagttgtgtttgtaggtttttttttttttttttttttgagatagagtcttgctctgttgtccaggttggagtgcagtggtgtgatctcagctcactgcagcctctgcctccccggtttaagcaattctcctacctcagcctcccaagtagccaggattacaggcgtgcaccaccacgcctggctaatttttgtatttttactagagatggtttcaccatgttggccaggctggtcttgaactcctgacctcaggtgatccacctgcctcgacctcccaaagtgctgggattacaggcatgagccactgcactcggccttagttttgtttttcttttagaggtgaagatcttgctatattgcccaggctggagtgcagtggctattcacaggtataatcatagagcactagagcctcaaactgctgggctcaaacctccggtgtagatactatagtctggtgtctaagaaatgatagaacttgtcttaacttaattttcagtcttaattattataatcacagttaaaaagtattagttaagtcacaatctcagtatattaccattaacctttccttctttggattagacctcattatttttggagggatcaattaacatggattgttaatgttacaaatgctttctactgaccaggtgtggtgactcacgtctgtatcccagctctttgggaggctgaaatgggataatcacttgaggccaggagtttaagactagcctgggcacagagagagacctctatctctacaaaatattaaagaattagctgggcatggcggcgcatgtctgtagtactagctgactgggaggctgatgaggaagtatcatttgagcctaggagttagtggctggagtgagctatgatgtccagcctaggtgacagagcaagaccccatctctgaaaaacagacacaagaaatgctttttatcacccagcctaagaaataaaacaaagagttttgaagtcccctggctacactttccaaatattttcttcttcctaaacccgtaagagttaaatccctatcctgaaattagtgtttatcttttttatgtatttatgtatccatggatatttgtcatgttgaaatatgatccctggctgggcgcagtggctcacgcttgtaatcccagcactttggggggctgaggcgggcagatcacgaggttaggagttcaagaccagcctggccaacacagtgaaaccccatctctactaaaaatacaaaaattagctgggcatggtgacaagcgcctgttatcccagctactcaggaggccgaggcaggagaattgcttgaacccgggaggtggaggttgcagtgagccgagatcgtgccactgtactccatcttgggcgacggagctagactccatctcaaaaacaaaaaacaaacaaacaaaaatccccgttgtggcaatgttggaaatgttgggaggtggtgatggcagtggtggccatggcagtggctgctcctgggctgcatgctccacggagccggtggaagccaggaacaggcagaagccccaccttctgagttggcagggcaggagcttcgtgcatgggcctcgtgctggcacctcgagctgcccgccctgccatagccagcatgcctggctgtcagcagtgggtgaaccccccgctcgcttgcttacacatgcctcaccactctgcttgcccttggcaggcatgggatccagcctggtagtgtgagcagagcacagcctgccaggctgagtgggcccagtgggccccgagggaaacttgggcagcagtgctactggccacagaggtttccggctggcgaagtgacacttcaaggattctgtaacagtggggcctggtgaaggtacttggatcatggggacagatccctcatgaatagattaatgccctccctagggagtgagtgagttctagtttccagaagatctggctgttaaaaagaacctccccagccgtttggcatgtgatcactgcaaatgctggctcacttctgctttgtgttatgagttgaagctgactgaagccctcatcagatgctcaatattgaactttccagccactagaagtgtgagccaagtaaaccccttttctttagactacccagtctcaggtatactgttatggcaacactaattggactaaaacaatgagtgtgactgctttatttttttatttttattttttcccctctgccaccctagtgtgactgtgttagatatctcatctcagtggaatcatgtaatatttatctttttatgattggtgtatttcacttataatgttctcaaggttcatccatgttgtagcatgtgacaggatttccttctttatttttatttttaaatttttaattaattaattatttttagatggagtctcactctgtcgcccaggctggagtgcagtggcacgatttctgctcactgcaacttctgcctcctgggttcaagcagttctctgcctcagcctcccgagtagctgggattacaggcacctgccaccatgccctgctaatttttttgtttttagtagagatggggtttcaccatcttggccaagctggtgttgaacttctgacctcttggtccacccgcctcagcctcccaaagtgctgggattacaggtgtgagccaccgtgcctggcctttatttttattttttatttttccataagttattgggggtacaggtggtatttggttacatgagtaagttctttggtggtgatttgtgagattttgatgcacccatcacctgagcagtatacactacaccatatttgcagtcttttatccatcgcccccatctcactttccccccaagtccccaaagtccactgcatcattcatatgactttgcgtcctcatagcctagctcccacatattagtgagaacatatgatggttggttttccattcctaagttacttcacttagaataaaagtctccaatctcatccaggtcactgcaaatgctgttagttcattcctttttatggctcaggaatattccatcatatatatatatatacacaccagagtttcttatccacttgttgattgatgggcatttgggttggctccatgattttgcaattgtgaactgtgctgctataaacatgtgtgtgtaagtatcttttttgaataatgacttcttttcctctgggtagatacccatagtgagatgctggatcaaatggtcgttctacttttagttctttaaggaatctccacactgttttccctagtggctgtactagtttacattcccaccagcagtgtagaagtgttccctgatcgccgcatccacaccaacatctactgttttttgattttttgattatggccattcttgctggagtaaggtgatactgctttgtggttttgacttgcatttccctgatcattagtggtattgagcattttttcatatgttttttggtcacttgtctatcttcttttgagaactgtctattcatgtccttagcctactttttgatgggattgtttttttcttactaattggtttgagttcgttgtagattctggatattagccctttgtcagatgtgtagatcgtgaaaattttctcccactctatggattgtctatttgcttttctgactgttccttttgctatgcgaaagctctttagtttaattatgtcctagctatttatctgtgtttttattgcatttgcttttgggttcttggtcatgatatcttgcctaaggcaatgtctagaagggtttttccaatgttatctcctagaatttttatagtttcaggtcttaggtttaagtccttagtccatcttgggttgatttttgcataaggtgagaggtgaggatccagtttcattctcctacaggtggctagccaattatcccagcaccatttgttgaaaagggtgtcctttccccactttatgtttttgtttgctttgttgaagatcagttgactgtaagtatttgggtttatttctgggttctctactctgttccattggtctatgtacctatttttataaagtaccacactgttttggtgactatggccttagaatatggtttgaaattaggtagtatgaggcctccagattggttctttttgcttagtcttgctttggctatatgggctcttttttggttccatatgaattttagaattgttttttctaattctgtgaagagtgatggtggtattttgatggggattgcattgaatttgtagattgcttttggtagtatggtcattttcacaatattgattctacccatctgcgagcgtgagcatgggatatgtctccatttgtttttgtcatctgtgatttctttcagcagtgttttgtagttttccttgtagaggtcttttgagtccttggttatgtatattcctaagtattttattttatttttatttttgcagctattataaaagggcttgagttcttgatttcattctcttcttggtcgctgttggtgtatagaagaactactgatttgtgtatattaattttatatccggaaactttgctgaattctttcatcagttctaggagctttctgtaggagtcattagggttttcaaggtaaatgatcatattgtcagcaaacagtgacagtttgattcctcttcactgatttggatgctctttatttttttctctcgtctgattgctctggctaggacttccagtactatgttgaagaggagtggtgaaagtgggcatccttatcttgttccagttctcagagggaatgctttcaacttttccccattcagtattatgttggctgtgggtttgttatggttggcttttattacattaaggcatgtcccttgtatgatgattttgccaagagttctaatcataaaggggtgctggattttgttgaatgctttttctgcatctattgagatgagcatgtgattttgtttgcttgtttgtttgtttgtttggcggagtctcgctgtgttgcccaggctggagtgcagtgctgtaatcttggctccctgtagcctccgcctcctgggttcaagagattcttgtgcctcagcctcctgagtagctgggattacaggcatgcgccaccacacctggctaatttttgtgtttttagtagagacagggtttcaccatgttggccaggctgctctcgaactcctgacctcaagtgatccacccacctcggcctcccaaagtgttgggattacaggtgtgagccaccactccctgccgtgatttttgtttttaatttggtctatgtggtgtgtcacttttattgactcacgtatgttaaaccatccctgcatccctgatatgaaacccacttgatcatggtgaaatatctttttgatatgttgttggattcggttagctagtattttgttaaggattttagcatctgtgttcatcaagggcatgggtctgtaattttcttgtttggttttatccttccctggttttggtattagggtaatgctggcttcatagaatgaattagggagggttcctcctttctctatcttgtggaatagtgtcagaatgattggtaccaattctttgaatgtctactggaattctgctgtgaatccgtctggtcctggacttttttttgttggtaatttataaaattaccatttcagtcttgctgcttgttattggcctgttgagggtgtctaattcttcttggtttaagctaggttgtatttttccaggaatttatccgtctcttctaggttttctagtttacgtgcataaaggtgttcatagtagtcttggatgatcatttgtattttgtgtcagttgtaatatctcctgtttcatttcctagtgaggttatttggattttctctcttcttttcttggttaatcttgctaatgatctatcaattttatttatcttttctaagaaccagctttttgtttatcttttgtatttttttccccaatttcatttatttctgctctgatctttgttatttcctttcttctgctgggtttgggtttggtttgttcttgtttctctagttccttgaggtgtgaccttagaatgtcagtttgtgctctttcaggctttttgatgtaggcatttagggctgtgaactttcctcttagcaccgcctttgctatatcccagaggttttgtttttgtttttattttacttttttgagacagagtcgcgctctgtttcccatgctggagtgctgtggcgtgatctcggctcactgcaacaggttcaagcgattctcctgcttcagcctcctgagtagctgggattacaggtgtgtgccaccatgcccagctaattctctgtatttttagtagagatggggtttcgccaccttggccaggctggtcttgaacttctggcctcaagtgatccacccaccttgacctcccagagtgctgggattacaagcataagccaccgtgcttggccgttttccttcttttttaagtctgcataatccgtttcaatataccacattttctttatccattcatctatcagtagacttttgggttgtttccatctgttggctatttggaataatgctgcagtgaacatagttgtgcaagagtttgctacatttatttttacttttatttatttatttatttatttatttttttgtggggtgggaaacaagatcttgccatgttgtccaggctggccttgagctcctgggcccaagcagttctcctgtccggcctcctgagtagctgggactacaggtgtgtagcaccacacctgactacatttatttatttatttatttacttttaatttattatactttaagttctgggatacatgtgcagaatgtgcatgtttgttacataggtatacacatgctatggtggtttgctgcacctgtcaacctgtcatctacattaggtatttctcctaatgctatccctctcctagccccccacctcccgacaggccctggtgtatgatgttcttctctctgtgtgcatgtgttctcactgttcaactcacacttatcagtgagaacacgtggtgttttaattagtaagctttatttcttattcacagaaaaattaagcagaaaatagagtttcccagcctgggcaacatggcgagaccccgtttctgcaaaaaaatacaaaaattagccaggcatggtgatgtgtgcctgtagtcccagctactcaggaggctaaggtgggaggatcatttgagctggaaggtggaagtttcagtgagttgagattgtgccactgcactccagcttgggcgatattgtgagaccctgtctcaaacaaacaaaaacacacagagtttctgtatacccctgaccctgcccaggcactacctcttcccacttcccactttttgtatcatagtggtacatttgttacaagtgatgatcctacactgacacattattattccccaaagtccctaattgacattaggattctcttggtctacattctagaaattttcataaatgtgtaatgatgcatttcacaaatgtatagtgaaacaataatccaccattttagcatcatacagaaaagtttcagttaaaacttaaaacttagaagtccttaaattcctctgtgctctgcttattcatgtcttcctcctaattcctgcaaccattgatctttttactgtccccatagttttatctttcccaaaatgtcatgtagttggtaacatatgatatatagcctttttatattggcttctttcaatgagcaatatgcatttaacattccttcgttttatggcttgatagctcatttctttttagtctgttgtttggatatattacagtttatttatccattcatctgctgaagaacatgttggtcgcatccaagttttggcaattataaataaagctgtcataaacattgtgtgcaggtttttgtgcggacaaacgtcttcagttcattttcgtaattaccaaggagtgtgatttcagcattgtacggtaagagtatgtttagttttgtaagaaactgccaaactcctccaatggggctgtgctctttggcattcccattagcagtatgtgaaaagtgtcacttgcgtcctcttcagtatttggtgttgtcagtgttctggaatttggtcgttctggtagctgtgcaatggtatctcattgttttagtctataattccataataacatataacttcgagcatattttcatatgcttgtttttatgtgtatcttcttgggtgagggtgacctcaggtcttttgcccatagtgttttcttattgttgaattttaagattcctttgtgttggctaacaatccttttatcagatgtgttttttgcaaatgttttctagtctgtagcttgtcttctcattctttttacttttactttttacatgtactttttaaaatagcaaaccaaaattatttaatattaaagaaaaccatttttaaagcaattctagcaagaagttttctctttattctgtcttccattaaaaaaatcttattttgaaacaattacagacttacaggaagttgcaaaaatactacagagcagtccagtgtatccttgtgtgtacataattccatgccattttatcacattcaccaccagcacaatcaagatacagcactgttccgtcaccacaaagatctcccttatgctacctccctgcaacatccccagcccttgagaacaatttttctccatccttattttgtcattcaagactgttacatagtagaattatacaatatgtaagttttttgagattagtgtttgtttttttttttttttttttttggagacagagtcgtactctgtcacccaggctggagtgcagtggcctgatcttggctccctgcagcctctgcctcctggagtcaagcaattcttgtgcctcagcctcctgagtagctggaattacaggtgcgcgccactacgcctggctaatttttttcttttctttttttttttttttttttttttttttagtagaactggggtttcaccatgttggccaggctggtcttgaattcctgacctcaaatgatctgcctgcctcggcctcccaaagtgctgggattataggcatgagccaatgagacaccgtgcctggctgagattagcttttttactagtacagtgctcttgaggtatatccaagttgtttagtctatcagtagttaattcctttttaatttcgattagtatttcctggtatggatgtaccattcatctgttgagggacatccaggggtgattttgactcttacatctaaacctgctgttaacatttgttcacaagtttttctgtgagcacaagtttttatttttctgggataaatgccaagtactgtgattgctgggatgttttgtttttttaatttttgtttggacaaaagtcttcagttcattttggtaattaccaaggagtgatgattgcggcattttatatttccgctgtggcattttatatttccactagcaatgtatgagacatctagtttctgctcatctttgtcagcatttactattgtcatgatcctttgtttgagctcctctagtaggtatgtagtgatgtctcactgtgctcttaatttacatttccctaatgacttttcctgtgctgatttgccatccatctcttctttccagtgaagtatctcttaatgtctttgcccattttctaattggattgttgttttactgttgagttgtgagattatatatttgagatttgagtcatttgtcagatatgttttttgcaagtattttttcaagtgtggatgtagcttgtgctttcattcttctatcatggtctttgatagagcaaaatttataattttaattaaatccaattaattgattttaaaaattatcttatggatcatactttttagtatcttgtgtgggacttcatcaaactctgtatcctgcagattttcttccatattttcttctgaaagttgtatagttttacatttaaatctgtgatcaattttgtgttaatttggggtaaatgtgagatttaatttttttttatggacatccagttgttccagggtcatttgttgactattcttcctccattgaattgcttttacacctttgtaaagaaaatcatttggccatatttgtgtggtctatttctgtgttttcttttttcctttaatctatgtgtctattcctctgctagtaccactaactcttatttactatagttatataactcctgaaatatgatagagtgatttcctctattttcttcttttgttaaacttgttttagctattctagctcccttacctttccataaaattttagaatactcatgtttataattgcaaaaaaatcttgctggatttttggtaggaattgcattaaactttatatcagttatgtatctccatgtatttaggttgtcttttgtttgttttatcagcagttagtagttttcagtacataagtcctgtacatgtttaatcaatttatagttcagtatttagatttcttttgaacaagtataagtgctactgtactttaaatctcaattttcatgtgtccatgatagtatatacttttgtatgctgatcttatagcctgtgacttgctggactaactgattctagtttttttttaattttttttgttgattcctctgtaatttttatgtaaccaatcatgttatctgtaaatagggagttttatttcttcctttctggtctatgacttttactttgtttgctgccttattatactagatagaacttccagtactctattgaaaaacagtagtgagagtggacactcttgctttatatctgacctcagaggaaaagcatttagtttgtgtgatgttcgctgaaagattttgtgttaagttatatcatctaatacctggagcaaccacttgaattcccgatcctataacaatctgtttcttctctggtagcttatagaagcttttctgtgttatcactgtcttgaaacaatgtactctgatattggtctgtttcatgtactgtgctagaacctgaagaagctgataaaatcgtagttttttgttctggggaaactttttgaattatttcatgggtgattttctcctgttttctctgttctctcttttggaacttctgtcatctatgtattgactgtttggactgtctgagcccatccttttcaatttcttgtgtgtaaaaatgctcttttcttctcttgtgtttttgttcttctctctgggaaattttcttaaatttgcctctgattcttgtgttgagtttaaaaacaatatatgcctgcctgtaatcccagcactttgtgaggccaaggcaagcagatcacctgaggtcaggagtttgagaccagcctctactaaaaatacaaaaattagccgggcatggtggcacgtgcctgtagtcccagctacttgggaggctgaggcaggagaattgcttgaatctgggaggcagaggttacagtgagccaaaatcacgccactgcactccagcctgtgcaacagagtgagactctgtctcaaaaaaaaaaaaatatatatatatatatatatatgcacacacatatatttatataaatacaaatacacacacatacatacatacatacatatatatatatatatatccccttgtttttatcattcttcaagagctctcttttattctccaagcgtctatctttttaattcttattttgttccatgtctgcagtatcttctcttacataatggaaatgattaatgacaatttttaatttctattgtgttcttcctgtgtagtattagatactttccagatgactattaatccttggctgtttgcacatgattgtcagtggcaaactgaaaagctaattgaaaacattgcatatctgcttgtcgactttgtttttttgagatggagtttcactcttgttgcccaggccggagtgcaatggtgccgtctgggctcactgcaaactctgcctcctgggttcaagcgattctcctgcctcagcctcccgagtggctggaattatagacacccggctaattttgtatttttagtagagatggggtttcaccacattggccaggctggtcttgaactcctgacctccgcctcggcctcctaaaatgctgagattacaggcgtgagccactgtgcccagtctatttgtcgacttttaactttattgtgaggtgctttggttgtgttgtttgtttgttggaaccctctgatggatagtatattttagtctttcctcttggacttgttaacatgtcccagaaaagacttacaagtgcccacctaaaggataaggttctggtgctagtgtcctggaagccccatgggaaagacgacatgaaggatgatgaagggatgtttcaatattaagtattaatgttgtcatttaatcttcttcacttttttgttttgcattcacctttacccagtgtccttctgtctgtctctagagagtaacctttcagccttgtgctgggaacggggaagatgagttgcctaacagggtaaaggtcttagcatcgatgtgtttttcagatagccgatatcaaatctagtcttctttattttagcttcatctcccatcaaatctagtacctggtattatcagttattgtgccttttaaagattctgcgatgtaaagtaatttgggcgtcaggttttttcccccatgcacaaccttgaacttttaagattgctaagtcagtcatcagtcatctatttccaaaatttcttggggttatatatttttaaagtacatttaatttaatattttttttcctagaattttctgaaggtataaaatgaaattcatgtcttcagtctaccatcttaactcagaagttgaaacaaccatttacttgtttcttctggcatttgccttcttatttaaaaacaaaggaaaaattttgggggaaatttatatattcacatggtttgaaaatgaaaaagcacaaagtatataatgaaaagtttcttctatccttcattttttttcattttccctctcataagtaactattacgattttttttttttttttttttttgagacggagtttcactcttgttgcccaggctggagtgcaatggcatgatctcggctcaccacaacctctgcttcccgggtttgagcgattctcctgcctcagcctcttgagtagctgggattacaggcatgcaccaccacgcccggctaattttttgtatttttagtagagacagggtttctccatgttggtcaagctggtctcgaactcctgacctcaggtgatctgcccgccacggcctcccaaagtgctgggattacaggagtgagccactgcgcccggccactattatgatttttatatgtcctcgtggagttcgtatatgtatgtatacatatatgcaggtctttttttctcttctttgtaaaaaaggtagtatattggctgggcgtggtggctcacacctgtaatcccagcactttgggaggctgaggcgggtggatcataaggtcaggagttcgagaccagcctggccaacatggtgaaaccccatctctactaaaaatacaaaaaatagctgggcatggtggcaggtgcctgtaatcccacctactcaggaggctgaggcaggagaatcgtttgaaccttggagacagaggttgcagtgtgccgagatcatgccattgcactccagccttggggagactccatctcaaaagaaaaacaagaacacacacacaaaaaacaaaaggtagtatattattctgtatcttcctatggttgtatgtattccttttttccactttatatcttctatctcattccatgtttttatagtgtaattcgttgtgttgttttgcagcggtaggaaatattctattgtaacttgattttttttcagtcttttgctattataaacaatactgttgtgaataatcttatatacaagttatttatctcatgtctgagtatatgtgtagggtgaacttggattaaggggtatttgtatttcaattttgattaatgtgagaaaatttaatcaaatttttggattttttaaggagctcttaaataagtgtcaatatatgtagttaaatttagttatatagtcctttttattttagcttcatctcctatcacatttagtacctgctattgtcaattattgtggcttttaaagatcctgtgatgtaaactaatttgagtgtcgggtttttttttttcccccaagcactaccttgcacttttacttctgactgctgcatcagtcatcagtctgacttagcatgcttaagtaaatacacacacacacacacactcacacaattttaaagatatatagttatcgttatataaataacatatttatatgtatataaatatatgtagttaaaaatttttaagtagaaaatgtctgacttatttaaaggtagtgtgaatagtgcgatgatccctaaggaacccaccagtcatcattttatgactattcttgtttcattagcatttatttccctccctctagattattttgaacccttcctagatatcatatcagtttattggttaacattccctcacttgtttctaaaagataaggtatcttaaaaatgtaaccacagtattgtaggggaggaaaacttctctgacctctcagggtctctgggtgggccaaaaaattaaactgacataagataaattaacaggagaaaagcatacaaatttttatttcataaaatttacatgtgcatgtgtgtccgaacagggaaatgaagacttaaggaagtggcggctgggcgcggtggctcacgcctgtaatcccagcactttgggaggccgaggcaggaggactgcttgaactcaggagttcaagatcagcctgggcaacacggtgaaaccccggctctactaaaatacaaaaaattagccggacatggtggcgggcacctgtaatcccagctacttggaaggctgaggcaggagaatagctcgaacctgggaggcggaggttgcagcgagcccagatctgccatggcactccagcctgggtgacagagtgagactccatctgtaaaaaaaaaagagaagtgactcagcctaagtttttttttttttttttttgagacggagccttgctctgtccctcaggatggagtgctggcgttggcatgatcttggctcactgtaacctctgcctcctgggttcaagctagtctgcctcagcctcccaagtagctgggattacagcgcctgcctccatgctcgcgctaatttttatatttttgtattttttttttttaaactagagatggggtttcaccatgttggccaggctggtctcgcatcctgacctcaggtgatccacccgcctcggcctcccaaagtgctgggattacaggcgtgagccactgtgcccggcttcggcctaaattattacatgctaggttgaacaaagaatgacatttatggaaaggtatctgggaagataagggctagtttaacaatgttcatttatacagatttctttcatccttgccttcacatctctggtgattaaaatgtttcttcttggtatgtaggaaggtcatctttcacttgggggcttcctttcaggaatcaaagagccggtcagcgtgtctttcttacatctgctgtttttcaaatgcttttagcccaaataatcaatatgccaaagaggcatattttggagtggtttgtcctgagctccttaatatcattatcaatatagttttaaggaatttctgtcatgtgtgaggttgagcattttttcttcttaatcttttttttttttttgagactgattcttgctctgtcatccaggctggaatgcagtggcacaattatagctcactgcagcccccaactctgggggctcagagggtcctcctacttcagcctcctgagtagctagggctacaggagtgtgccaccatacccaactaattttttgtttttattgtttgtagatacagagttttgccctgtctcaagtgatcctcctgcctccgcctcccaaagtgttgagagtacaggcgtgagcaggcacagagcaccttttcatatgattcagaaccatttatatttcctgactttactttttttgcttcttgttcatattatattggttttgtatcctgtaatattgttgagttcacttactattattatgtggacttaggacttgatgggagcagcaactctggatattcttgtattattattgctgttaataggaatactctgaaccattacctgtgacatttgctgtagatcttttgtagatgatcattattaggttaaaaaagatatttttgttatttttttttgttcatatgattaggtatagagtctaattgaatgctttttctgcatctgctgaaatattaatatcattaattacattaatagattttatactgccaaactattactgttgcttaggtaaatctaattcagttatgagagtttatttttttcatatatgttgctatttaatttgctgatattttgtttaggatttttgcaactatgtatatcaatgggaatgacctatagttttataattttcttgtcttgaactacctttatttagtttcgacatcaatattattactagttttaggtaattagttggtggggtatgggatggttttctgatctcatggggaaggtgtataagattgaaattggtgccaattgaaacttaaaaaaaatgccagttcaggctggccattgtggctctcgcctgtaatcccagcactttgggaggttgaggcgggtggatcacttgaggtcaggagtgtgagaccaggctgaccaacatggcgaaaccctgtctctactaaaaatacaaaaattagccgggcatggtggtacgtgcctgtagtcccagctactcagaaggctgaggcaggagaattgtttgaacccgggaggcagaggttgcagtgagctgcgatcgtgccactgcactccagcctgggtgacagagcgagactctgtctcaaaaaaaaaaaaaaaatgctggttcagtttttaaaatgattacatatatataatatatgatgattttatatagtagcttttcttctttttattcaattgtataaattatgtcaacttataatgaatacttctccttttcaagtattttgaaagcatgaaaatagtgggaattatacaataatattcctcaaagcttacaatttattttatccttcctgtcaggtgctcaaaaatgtgataactttgctgaaaaaagacccctccttggtgtttgtaagagcattggatcttctgggtaaggaaattttaaaaattctttgtatcacctattacaaatttatattattccagagggagaactttgatgttataaaacctttgtaaccataagactaagctctcataagagagaagaagaagaaagtaaaacatatttagggtttccaacagtaaatgacatttattgatgctatagcatgtgcctgacactgttctaaaggtgttgtgtgaattttcttttttatttattaccacaatactgtgaacaaatacaaatatctttccagttagtgcattccctcaaattgaacttctggctgcaaggaaagctaggaatgattatggttttgttagtaaggaaaattatcaaaatggatattaggttggctactagcagtcttggcctcatgctttcagtaaatagtgtgcacttcagatcatgtggcattggagaaaggaagaacatgttaataatataacatggttaggtcatggagtcttgattattgtttcctaatggtactgtttgacttcataggctacaagacaaatttcttcaagtgtaaatttttcgattgaagaagacataaagcctttgagaatttactgtatactcagcactttgccgggtgtaggataaggatacaaaatcatgaaagcctaatttctttccccagagacttatgaatgtggctgaaaagaaaaagtacaacacatgcaaaataattatgaaataatgatgtatgacaggaatgcagagaagggagagatcagtgtgcatgaattaatgagaaaaagcctcatggagaaggagcagcataggttagatcttaaggaatgggaaatattgcagcagatgagaaggactgccagggtaggttataatatagtagtggaagagaaactgaaataaatacatttaagaatggtaagagtttgtgggccaggcatggtgactcacgcctgtaatcccagcactttgggaggctgaggcaggcagatcacttgaggtcaggagattgagaccagccttgccaacaaggtgaaaccctgtctctactaaaaatacaaaaattagcccagtgtggtggcatgtgcctataaccccaactacccggaaggctgaggcacgagaattgcttgaacctgggaggcagaggttgcagtgcaccactgtactccagcctgggcaacagtgagactctgtctcaaaaaaaaaaaaaaaaagagagagtttgtgacttagatttaatgccatctgcaaaacagatgaaaacaactattgcagtactctgaaactcaaccaaaagcatataataatctgaaaagtgtttaagcttgagaaactgctaatctttgcacaataacagtgggaatctgtggcattcatgcctgcagctgctcctgtcccactccacactttccctcttccagggttggttggttggttggttggttatagagtgtcttccagggtgagaaaggttttgaggactagtaccttacctgctgtgcttggaaaattttcgctcatctctgagtggcaggtattgcatatgcctgccagcattatctgcagaaattactgtcttgatgacatgtgtgctttgagagccattggctctttcagcctaagataatggttagctgaggcttcatgcatatgcagaggagccatgaaaaagggtccagggggaagaaaaatctgaatagatgtgcagatcctttggcaaaggaaaacaacttttgttgacctggggtatttgagtgaatcctctgttgagtagttggctgcccactaagatacatagatgcatggccagaccctgaaagtcaggctttaaagtaatgcaagaataaaagaaataataaaactgaacagagaaatcagcaactgcaaattgtggaagaagacagatttcatagaatccagagtaatgttatactgtattatataaaatgtctatttttaaatataaaattatgacacatgccaagaaacaggaagttgtggcagtgagaaaaaggcagacaatagaaatcatacctgactggtcttcagaaaagcctgagtcctgtcctctcactctccccactggacagcatgagcttcaccacttgctccacgttctccaccaaactaccagtctctgggctctgtgcaggtgcccagctatggcacccagccagtcagcagtgtggccagtgtctgtgcaggcaccaggggctctggttcccggatctccgtgtcccactccaccaacttctggggtggcatggggtccaggggcctggttgtggggatggcggggggtctggcaggactgagaggcatccagaatgagaaagagaccatgcaaagcctggacgattgcctggcctcctgcctggacagagcaaggagcgtggagaccggaaaccagaagctggagagcaaaacccaggagcacctggagaagaagggaccccaggtcagagactggagccattacttcaagaccatcgaggacctgagggctcagatcttcccaaatactgtggacagtgcctgcatcgttctgcaaatcaacagtgcctgtgttgctgctgatgactttagagtcaagtatgagacagagctggccatgccctagtctgtggagagggacatccatgggctctgcaaggtcactgatgacaccaatgtcactcagcttcagctggagacagagatcaaggctctcaaggaggagctgctcttcctgaagaaaaacctcgaagaggaagtaaaagtcctacaagcccagactgccagctctgggttgaccatggaggtagatgcccccaaatctcaggatctcaccaagatcatggcagacatctgggcccaatatgacgaactggctcagaagaaccaagaggagctggacaagtactagtctcagcagattgaagagagcaccacagtggtcaccatgcagtctgccgaggttggagctgctgcgttgattctcatggagctgagacgtacagtccagttcttggatattgacctggactgcatgagaaatctgaaggccagcttgcagaacagcctgagggaggtggaggcccactacaccctgcagatggggcagatcctgtagactggatcctgctgcacctagagtcagagctggcacagaccctgcagagggacagcgccaggcccaggagtaggaggccctgctgaacatcaaggtcaagctggagactgagatcaccacctactgtcacctgctggaagatggtgaggacttcagtcttggtgataccccagacagcagcaactccaggcaaaccatccagaagaccacctctcccaggatagtggatggcaaagtggtgtctgagaccagcgacatcaaagttctgagacattaagccagcagaagcagtgtaccctttggggagccaggaggccaatgaaaagttcagaggtaaaaaaaaaaaagaaaaaagaaatcttatgtggttgtctccagatgttaaattttacaaagattttaaagcagctattataaatgtgttctaagaactaaatgaactatgtataaagaattaaaggaaagggttatagcaataactcaacaaatagataatctcaacaaggagttagaatttatataaaactcaaatggaacttctgctgttgaaaggatataaaagatatagaaagtgaaataggcctggatgcagtggctcatgcctataatcccagcactttgggaggccaaggccagcggatcgcttgagctcagaagttcaagagcagcctgggcaacatggtgaaaccctgtctctaccaaaaaaaatacaaaaaaattagctgggcatgatggcacacgcctgtggtcccagctacttgggaggctgaggtgggaggattgcttgagcctgggaggcagaggttgcagtgagcccagatctcaccactgcactccagcctgggtgacagagtgagacccagtctcaaaaaaaaaaaaaaagttcataagttgttttcataagttgttttatggatgtagacctaatatgtcttgttgttaagtttttgtctaaatgtttgtagtaggtgagcatatggtgatgttgaatagagtagactctttagtagctactgttggggaggaatacttttctctcttaaattctttggggagagggctgcaatttaaactgacgaaaggcagattagcaagaggacaaaaaatcagatttaattacatatgtacatataggagtttgcaaaaaaatgtgacttaaggtggcttatatatcatctcagtaggagatggggatggagagggacacaatttgtagaagggcacattttgtagaacaaatgacttcttagaatgggagcagaaggaagggcacttgtgactttttggaaaattaaggtggtccttaggagaaaagacaggagatgtgatagttttgtaacaatatctgtttgggagtggtcctagaagagattaagttgctccaggggaggagatttatgacaaatgaagttttttggagggctctgctctgcttttaggtagataaagtatactaggaacttgagtgctatcaacaatccatgagtcaatacatacatacatacatacatatatacatatgtacagttgagtttatgacaattaagtttgtgtgttcatttatttattttagagacagagtctccctcggtcacccaggcccaggtgcagtggtccaatcatagctcactataatctggaactcctgggctcaagagatcctcccatctcagcctcctgagtagctgggactataagttatgccactgttgggctaattaaaaaaaatttctttttttaagagataagttcccacgatgttacccaggctggtcttgaactcctggcttcaagcaatcctcctatcccagcctgccaaaatgttgcaattacaagtatgagccaccacatctggtccaatcatattattcttattttatgcatgcagaagctaatagaggttcagtcacacagttagtcatggacccaggcttttgcttgaccctcaagctatgttctttccagtaaccatactgtttgtcattatggagggcattcctctatacatacacaggcatattccgtctatagactgtattaagagtgccctaacctcagatttatatatttacaattttctgaccagttattttcagaggtaacaaagatttcttaaaaaaaaaaaaaggaggttatgttaggagcaattaagcaatttgtttatccctgccagagtacctaggactacaggtgtatgccaccttgcctggctaatctttgtatgtcttcttttgagaagtgtctgttaatgtcttttgcccactttttaatggcattgttttttgcttgttgaattgtttaaattcgttatagattctggatattagatatttgttgggtgcatagttagtgaatatttgtgaatctataaatattcacaaaaaatattcactacagatattcacaaactgtgcatccaacaaaggtctgtagattgtttgctctgttgatagtctcttttgctgtgcagaagctctttaattagttcccaattgtcgattttgtttttgttgcaattgcttttgaggactttgccaaggccagtgtccagaatggtatttcctaggttttcttctaggatttttatagtttagggagtcctttccccattgcttgtcattgtcgactttgttgaagattagatggttgtagatatatgcagctttatttctgggttctcttttctgttccattggtctctgtatctgtttttgtgctggcaccatgctgttttggttactgtagccttatagtatagtttgaagtcaggtaatataatgtctcagctttgttctttttgcctgggattgctttggcttttcaggctcttttttgttctatatgaattttagagtagttgtttttctaattttgagaaaagtgacattggtagtttgataggaatagtattaaatctatagattgctttgggtagtttgaccattttaacaatatttattcttccaatccatgagcatagaatgtttttccatttgtttgtatcatctctgctttctttcagcattgtcttgtagttctccttatatctttaaccttgttcattagatgtatttcttggtattttgtgtgtgtgtgtgtgtgtgtgtgtgtgtgtgtgtgtgcgcgcgtgcccattgcaaatgggattgcattcttgatttagctctcagtttggacgttatttgtatatagaaatgttactgattttactacctttatttttttttatcctgaaacttactgaaattttttattagttctagaagccttttggtggagtctttcgggtcttctaggtatataatcatattgccagtgaagagagataatttggcttttttcttttttcctatttgaatgccttttatttctttctcttgcctgattgctctggcaaacagtagcttcttaagagagtctttgtgttaggcgtatattttgatgcagtgtttctgcataagcaaaagatacttttgttattttagtacgtttgacgtataccatttagttacttagaatttttcagtgtggaaaaggacttctccaattttattttagtatttttttcttcatttaaacacattgtttaatgaattcaaaggaagtctcctttacatgatagcaataatataagaaggacatggctattagaaaattgtggtcactaatttcaggaacactattatttaaaagtcctgtgccttctagattcctcaaggatctagaactagaaataccatttgatccagccatcccattactggatatatacccaaaggattataaatcatgctgctataaagacacatgcacgtttattgcagcactatttacaatagcaaatacttggaactaacccaaatgtccatcaatgatagactggattaagaaaatgtggcacatatacaccatggaatactatgcagccataaaaaaggatgagttcatgtcctttgtagggacatggatgaagctggaaaccatcattctcagcaaactgttgcaaggacaaaaaaccaaacactgcatgttctcactcataggtgggaattgaacaatgagaacacttggacacaggaaggggaacatcacacaccggggcctgtcatggggttgggggaggggagaggaatagcattaggagatatacctaatataaatgacgagttaatgggtgcagcacactaacatggcgcgtgtatacgtatgtaacaagcctgcacgttgtgcacatgtaccctagaacttaaagtgtaataataaaaaaaaaggaaaaaaaaaagtccagtgccaacttatgtccaatacaaagtaatttcaagaatgggcagattccttcacctgcttccagttttttaaataaagtaacaaaaaacagcaggcaactgatgatgtagaacagaagatgtaatgcttccaaaataatttaagttaatgagactcagtttataggcataaatataggtgatacgaggaaccattcagggagccaatgaagtctgaaataatggaaagagtaggagaatacatagttacaagacagcaaatagaatagtgactgcatcaaatggagatggagaaagccacacataatcatgaagtgtctgcttagagacattcttcagtttcacatgtaccttgagaatgttttctttatcttgcccatctttatttctttcttggtattaagcgcagtgccctatatctaggagaccctcgaatatatatatattttgcctaagtgaattttaggaagcttcctatacgagtagttatactcatcctttattttttagtatcacttttttatgactgagaatatctcttaatctaaggaatcatatgtactgtacctgggtatttacattttcgtagccagttgggtacaaaaccttaggacatccctccatttggagaggagtgggatgtccaggttgctctccagctccctggcacatactttattgaacacccatgtagtttagactttgtcaagttgcttatattcacaactaatactgcctattaaattattcttgggaaaattcactaagattttcttttgatgtataacttttctttctttttcttttcttttttttttttttgagacggagtcttgctctgtcgccagactggagtgcagtggcgtgatctcagctcacggcaacctccacctcccgggttcaagcgattctcctgcctcagcctccctagtagctgggactacaggtgtgcaccaccacgcccagctaatttttgtatttttagtagagatggggtttcaccattttggccaggatggtcccgatctcctgacctcgtgatccgcccgcctcggccccccaaaatgctgggattacaggcgtgcactaccgcggctggccagcttttcatttttataaattcatagtgccttttctaagaagaggggaattgctatggaaagtgtcagtcaaagtcaaaataaaaatacagagatgaatctctatgcaaaacattttatttgagaatgtacataaaacagaattgcaatttggggccacatacacagtttggggtggttttgttatgtctgaagaacaaagaaaagcttgggaaattagagaaatgcaacatattgttttagaagaaagctcattggcgctagagtgacaatggtggagttatgccggttcgtttcagcagttactagttataactgatcttagggttatagcaggcagtttcagcagctgggctttacggctaatttttggagcaggtgctatgtgccccaagtgctttcccccactggcccctcaactctgatttagttgggtaagacaaaaatgacccaatttgcataattagctctcaccaaataatcccagttgttcatattttatcctttagtaataaatacattgccccagcccaaaatttaacatactctctcttactgcattgatgacagtcattaaaatgccatttatttaggtattctagtgttttgtttcgttgtgttttgagagatcataccataataattccagataagtcatttaagctcttggaaagggataatgtttattgtgccactgatccagaaactaaggcagtgtcttgtgtaataatgtgagagagggaggaaaccaaagtttattgtgtgttatatgctaaacagttcccagaatgtagctatttatggttaggatcttgttggctactatgagtaatagcaaatgagtaacattattcaagagctgactgcagaccttgaagaatgtttaatccaatatattatgatcacattacacacattacgtgaaaatatgacctttatgtagagagaatcatagactattggaagtggaaagaaccttgtagattatgtcatttaactgccttgtgttgtagatgaagaaaagaggttaaatgtttgtccagaggctcccatcacgcatcactgtggtgggaaaaaattcttgtaagagtgagtgaaaatttcttcatctcagttggttaggaatcccttatcgctcgttatataggctttctatggccattgtttccaagactggattttaagaatcagaaaaattagtcttttgccaagcaagaacatatgaaaaaattataattgactatcagttaatactttaaatttactttgagaaaagcaaaataatttttttttttttttttgaggcagagtctcactctgtcacccaggctggagtgcagtggcgtgatcttggctcactgcaacctccacgtcctgggttcaagaaattctcctgccacagcctcccaggtagctagttctacagacatgcgccaccatgccctgctaatttttgtaattttagtagagatagggtttccccatgttggccaggctggtcttgaactcctgggctcaagtgatccatccgccttggcctcccaaggtgctgggattacagatgtgagccattgcacccagctgagaaaagcaaaataatcttaatagctaaataggaggaatgacttaatttcaaaattgactgtttattaaatagaatacagttaattcacaatattaatattttcctctcattattacaaactggcaaaagcatcatcttggattggcagaagttcatggagtggtatgtggaaaccagtttcctaaagctgcagttattaggtggaggtgaagcgcagtgtcaccatcctgaagtggtactgcagtgactttatttcaacgtttgtctaatgtaaataagggttatgttattaaataattagaagtagaagcatattgcttgggatagtcggtatgtgactcttctttttgtcatgaaaaatcccagagcccttatatatgatacctgatgctttcaattttgactgatttttgtcagttgtgtttgcgagttctgaccgatattatctccataggcagcaaagtagatttatgccgttttcccagtctttgctgcttgtagacatggactcttccagcagttccttggcaccaaatccagacaccaagtctttcatttgcccatctctctggcatttttcaggctttctgtgggtacctgggttttcttctagctctctgccatggctctgtggctgtctttactgctcaaagaaagagctttacatcttaggtataccgtttatgctgacagctgccgcactggcatagagacgtttttaatgggatgggttagcataccaggtgatccaataacgtagatgatctatggggctctgggctttagtattaacttagaaccacgaagacctcagtgcatgctagatatgatctctgtttatctgattatggatgtaggaaatcttagggaaataagatgactttactgttacttctatttaattactctttctcatgtggcttagggatgttttttataatatgtcttaaaatgttaacattgtctttgataaacaggagtcactagtataaatgctaattgtgtacatttttcatgaccccagttcacttaattacttaaagcaaatttttagtttttgtttggtgataaggcaaagggcccggaacattacacacctgactgacacttaatacaattttaaaacacatgctgaacaaatctcagtgggaggttaagagtagtctgtcagtgtcaaggaatacacatattacattgtaaaattgtaaccatgggctagttgtttatatatttattttaaactataatatttaaactatggacacatctaaagactgtgtgagattatatttcagactttgtatattttcttgtgatattgaaattggtacagatctcaaatggtttaccaaaatggttatttgcaggtgaccaaaccaaaggaatgctggtttaatttcttacagaattgctttacttgctgtttgatatgtgtattcctgaaaatctgtgctgttagggcccttgctggaaacagatagcatactcaaattgggtgattcaaagagagtttaaataaaataacacatgtgggagctgagactcattatccttcctcccttcccctccccttctcttccctcctaccctccccctctccttcctttcttcctcactctctttctgagacaggatcttactctgtaacccagactgaaggcaatggcttgatcctagctcactgtagcctcaaactcatggaatcaaacagtcctcacacctcagcctccttaatagctaggactacaggcgtgagccaccatgcctggtttattatcatttctaagcaagaggagataacccttagtaaagcctgcagagaaagcgatatgaagagggttagcaacaggaactgtggcctctggtggatggatttagcctatcttcagtaacctgacagtgggacatctttttttctttttttttttttctgaggcagagtctcgttctgttgcccaggctggagtgcagtcgcacgatcttggctcactgcaagctctgcctcccgggttcatgccattctgcctcagcctcccgagtagctgggactacaggcacccgccaccacgcccggctaattttttgtatttttagtagccaggatggtcttgatctcctgaccttgtgatctgcccgccttggcctcccaaagtgctgggattacaggcgtgagccaccgtgcccagccgacggtggggcatcttatttctccagaggcttcctatggggtcatcccagtcagaaactaggggctggattctgaaggtccagagagcccactgatgcaattcataggatatggctcagtctcccaaggcaaggaacaagatatagagaatgcagtgtgtatttggaggggcagtacacttcattctacaaaatttcacactaaaatggatagaaataggcttggtgaaaatgtatgcaacattgttttcagaacaataatttgaatacaaaattagaacatttaaaagttgttttaatgctaattaaaaaaatttaaaaagtaaaagattttacctaaaaaaagacaaagatgccctgatggaatgggggtataagaaagagttgagactgttacgttatggagaaaagaacaaaatggacaaagaccagggagtaacactctttaagcactttcaaaccagaggacatggttaaactgagccatgaaaaacatgatttctcctggttttctacattcagttgatctaatgtactttgtattcagttgctgttaaattatagtacaaaaaagtaaaatggtatgaattttatttattaataaaactaactttttttttgagacggagttttgctcttgtcgcccaggctggagggcagtggcacaatctcggctcactgcaacctccgcctcccgggttcaagtgattctcctgcctcagcctcccaagtagctgggattacaggtgcttgccatcatgcctggctaatatttgtatttttagtagagatggggtttcaccatgttggccaggatggtcttgaactcctgacctcaggtgatccacctgcctcagccttctaaagcgctgggattacaggcatgcgccacctcacctggccataatacaacttctttgatgtactgacattatttctcattgagaatcataattgtagcaggaaagactgcagtgtgtgaggtcatacatacatacatacatacatttaattattgtataattgaaattcaatgaactatacatatttaaagtgtataatattatgtgtttgatgtgtatatacctttgaaactctttctacaaacaagacaatgaacatcttattccccaaagtttcctcatgtctctttgtaattcttcctttggcccctcccagctcttttcttcaagataaccaatgttctactttctgttactatagattagtttgcgttttctaaagttttatataagtggaatcatatagtatgtactctttttttgtctagctttggttactcagcgtatttattttgagattcagccatgatattacatgtatcaatagttttttttttgtgacagagactccttctgtcacccaggctggagtactgtggtgcaatctcggctcactgcaacctctgcctcctgggcccaaacgatcctcccactggggagctgggactataggtgagccctactgtgcctcactaatttttgtgttttttgtagaaacagggttttactatgttgcccaggctggtcttaaactcctgagctcatgtaatccacctgctttggcctgccaaagtagtacattcatttttattgtgaaatattattatattggattagtttactagagtatgattatgctctcatctgttgatggatattttggttgtttttaggttttggcctttacaaataatgctgctatgaacattgtattcaagtccgtatagacatacatatttccttttctcttgaccagatacctacaagtagaatggttagatcacatgttagatgcatgcttttcaaagtggttgtacaattttacatctacaagtggtgtatgaaatttccagtttttctgccacttgagaaacacttgacattgtcagtctattttattaagtcttttttattttagctattttaataaatatgcagtggtgtgtcattatggcattaatttggatttttacaagttgttcttcattttcaatccttaattcagttacctcttcattcatatctccctgttatttggccattttgagtttgtgaatttctcgtttataatattgtttacctgcaattgctacagacttacctcacgtaagctcttgaaaagctatacctatgctactttacatacactttttttctggcataacagtttttgcacaaaacacagttttcaataaatataagttaagaagtaatatttctatgtataatttcaggcagagacactattgccagtttagtcaaaacaacagtctctagtcaaagaatattgtatcaaactactttgaaatgtacagtttccaattactgcagaagtcccttttaaggaattgcacttccaggtcagacctatcagtgttcttgcggtgtcccctctcacttgaatctgagcttctttgtgagacttgctttaaccaataacatgtcagtagacataccagaaatgcaagcttgataaatgtttttatattgggatttactctgtgaaaccaccatagtcattatcatatgtgggtgaaataccacatggagaaagagacccaaccatccttactctctcaacttgcagccaactcagaagtagaaaatagctatatgaatgagcccaggagagaaaatagcagaagaacaacccatctaattcacaaaatctgagaaataaagtgattattcacttgagccagtatggtttctagtggtttctcatacagcaatagatacatgaaccatagtaaccatatttgtattaaaacaaaaagttttgctttgtttatatatgcctagttagtgggtagatgtggtagtactgtcacaactctttaatctgtagtttgccatgtttccctgtgttttggagcacccttgattttagtttttatttagtcctaagttgttgtttgattttacagcaagggaatcgtgagtcccagaaaggttgaaaaaagggtgaggggaatggtgcagatacaagggaagcaaaggggaaaaaactttaatcatttttcaaaagatggctttatagagaggattgagggctggcaaagtggctcatgcctgtaatcccaagattttgggaggctgaggtaggaatatcacttgagcccaggagttcaaggctgcggtgagttgtgattgtaccaccgcgatctagcctgggtaacagagtgagactctgtctcttacaaacaaaacaaaacgaaatggagagagaaagggagaaaattgaaaatggatgtagaataagagaagttaattctctttagagttaggtcagtcactgaactggttttttgttctaggaagtttcgtcatctccaaaaatagtcacggtgtttgagaaatgtaaattgtatgtaatacactacatggagaatgaaagccaatggtgcattaatattgtcaaactgtgagagaaggcagtcttccatcttgtgctttttttcacacagagatttttcttttatgactatgccaggtttttgtttgttttaattttagtaccatagtgttgaggaaaagaaaattctcattaagcatgtctgattctgatattgaatgtccccctggaagtggatcacctgactactaccttccaaaatatgactccctggcactctttcttatcaacagccccttacaattaagtcacttctcactttgactactataataaactttcattatgtgttagtattcaattcatttttctttctcttgagtaaatatgagtttgtatataattcattacagtttttcccgttaaaagtaatggaaatgattttccatttaatgccttttcttttagtggcagagttttcaggaagaaattacagtcactaagtaggcatacatgtatttataattatgttgagctgttgtgttttagttttctgttttgtgggatttcgggaagatatttttattatcttttatgatgatgattttctgatgagacccttaccttcagctcctttcttctttcttgcttttatcacaacattcccaagggacacatctcatttctgatgctttccttctctgattctttccctttggctggtatctcttgtccagcacatgttctcgtctccttccttgtgattccctagtagcccaggctttgatccaacaggtcttaagcctgttttcagcatttccctgctcagggtgagactccctgcttctcagagtgaatcctacatgacttttttctgtgttctgtcaccaatagatccattccattcttctgttttgcaagtaattcttgctcagctctggtgccagctcaggagccatcttggccaattttgaatatttataatccccctacataattgttatttaaagttagtggtgtttctgttttctagttatgctgtgttgtgatttaggggtgatttcatttgtttcccttgccgatgtgttgttttctggaagatatttggagttaggtggtcatatacacatgcacaaacacatttgtaaaaatacatgggttgggctgggcgcagtggctcttgcccataatcccaatactttgggagaccaaggcaggaggatcgcttgagcccaggagttcgaaaccatcctaggcaacatggtgaaaccctgtctctacaaaaaatacaaaaatgagctgggtgtggtggcatgcatctatagtcctagctacgtgggaggctgaggtgggaggattgctggagcccaggaggtagaggttgcagtgagctgagatcacgccactgcactgcagcctggatgacagactgagaacctgtctcaaaaaaaaaaaaaaaaattaggttgtgttgcacttatgtgcaccttgcttgcttttctcttttaatgtattatagtgtggttttatttaatgatgaatattcatcctaccttatgcacattatttcattatatacatatcttagtaatatacattttgaaaatatagataataggttaaaagagcttaaagcttaacataggccaccttgtgctttcaccacatctccgaatctcatgtgtggctttataagattttgtgtcagagtatgctggtgtcctagtttgttccttgcactgtaacaaaataccacaaacttggtaatttataaataataattatttataataatttataaatattataataatttataaataattatttataataatttataaataattattatttataataatttataaataacagttctggatgctggaaagtctgtgatcaaggcagtggcaggtttggtgtctggtgaagaaggctcagtctttgcttccaaggttgcaccttgaactccatgtcctcacatggtggaagggcaaaaaagggcctagggtgttctctgcaacctcttttgtaaggttgctaatcccattcatgagattgggaaagctctgccctcatgacttaatcacctcctaaaggccccacttcttaatactatctctggggattcagttttttttttttttttttgagacgaagtctcgcaccgtcacccaggctggagtgcagtggtgtgacctcagctcactgtaacctccgcctcccaggttcaagcaattctcctgcctcagcctcccaagtagctgggattacaggagcccgccaccatgcctggctaatttttttttgtatttttagtagaaacagggtttcattttgttggccaggctggtctcaaacttctgacctcgtgatcctccttccttggcctcccaaaatgttgagattacaggcatgagccacctcgtctggctagttttatttttgattgattaattaattaattaattaattttgagacagagtgtcgctctgttgcccaggctggagcgcagcggtgtaatctcgtcttactgcggccttcacctcccggtttcaagcaattctcaagcctcagcctcctgagtagctggggttacatgagtgcaccaccatgtgcagctaattttttgtatttttagtagggatggggttttgccatgttgcctcaaattcctgggctcaagtgattctctcgtgtcggcctctcaaagtgctgggattacaggcgtgagccaccactatagctggtccaattcaaaaatttagcatatgaattttgggggacacattcagaccattgcagctggtaaggtaaaaaagaagaaaatatttgtgaaaggtttgcttctatactgtctgattctaaacttaagaataaaaattggccacatatttattaaaatggggttctctccctaaccattttactaccatatatttcatgtagcaatgttgcaaagaggtatgttttccatgagctacatctaattcttgtctttcttctcatctctcctgagctatttgcctggaaatttaacaggagtacttagaaatgggacataaagaaagatcaccagaagatagtagtctataatgtatatctgaagaaagaagcccacaaaacaaatactggcataatgataacgtggatgatattaggccttcagtggcagcttttgcaatttaacaggaactctgcttgtagtgatatttctgtttaatggatacaaatatgattttgtatttgataatttttttcatatgtaggtttaacgtaaggtttatactccataatatttattgatattcctgaatccatggatgaaaatatagaataatggaactaacaagggttttggagtcacatagacctagctgtgagttactagctgtgtaaactaaattactcaacagttcttaggctcactttccttatttgtaaagcagtgcttatataaaactgctgtgattggttcttgtgtgaattcaatgaggcactgttttcaagtattgattacatcctgatacatgttaggtgtgcctcatactatttgggtcaggaaggtattaaggatagttagatatcactcttcaccaggaatttcttttcatttatatttatatactttctttgagtgggagttttgcctctatgactgttcgagaaatagggctgtacccagcttatctggtgcttgtgctacagattggccagtcttcattgcctaaccgagtactgcatctagaggtctttactttcattggaaaatggtaatgtgttcatattcccagtagaagctcatatagtataaagctacatgtgtgtgtatttttgtgtgtgtctttattgaggtatatggaaatatgatgaacggcatatatttaaagtgtacagtttgataaattttgacatctgtatatgtccatgaagccatcacattccaatcaagataatgagcatatccatcacccacaatagttttctcatgtttctttgtaatgcacccttcctgttcctccccctgtagaagaagcgtgtttctatgtaataagtcttcccgagtagcagtgccatcttcactttgtaatgaggtttttttgggaaatactttgctgtcacatagttcaaagtgactttagtatacagttaaaaatataaaggtaaaggtattgagttcaaagttgttttttcttctgctctacaacttaaccaaaaagtaaagctttccatctagaaccagttcataaaacaactaaaaggcttgcagtttctctgtgtaatcatttcaaaacaatagttttttttcagccaccaagaaggatgcagtcttgacatataaatagaaaacagattgagtttttggctgatattgctatactggtttaaatgttggtccagtcaacttcaggcttagattacaagatttgcaaattagaggaaaaccaaaagggaaagaacatctgcatagattctgactttgtggaattccatacaggcatgcttactctacttctggtggaacaggccatgtgcatagtgaataagcctgaaaagagatcactgttgtgttgtgattatgttaaagacaaaagttgaagtagataattaggcaattcattatggagaaccatgacagtttctacgtcaagtatttttaaccatttttttgggggggaaatcttttgttgatacagtgatatgttactttgccagaataaaaccttgctaaatatcactaattatgttacttgattttctggtatcaaagtattgggatttgaaaaaggtaatttgctgtaactaaggattttaaattggttataatcaaagactatatggatataatttattctataaatgacaacacagtctcagtgagatgtaaggaatccttgtctgctactgggctaatcatacattgtgtatatgattttaagatgttttctaaagatcacctctcctgccatttagatatgaattttaagaactgctttatttgattttttttctcttttattctgagaaggggcttccttatgttctttcaagacatgtttatgggtatctattatgtgtcagctactgttaaataatccaggacatcgtttcttaactgagggaaaaaaggtagagatgattttgatccccaagggatatttggcagtgtctgggggacattttttggttgccacatcatggagtagaaggtgctgttggtatctagcgtgtagagtcaaagaacctgctatactgtgcatcctataatttgcagatcagcccttaacagcaaagaattatctagctcataatatcgatagggtcaagtttgagaaaccctgatccaagaagataaaaatctgtatgtctagaactgacattgctagacatttcttgctagagctgacattctagcaaggagagtgaaacagtaaaaaaataagtaaaatatatagtatgatgatgtaatgtataacaatagtagagggtcgggtgtggtggctcacacctgtaatcccagcactttgggaggctgaggtgggtggatcatgaggtcaggagttcaagaccagcctggccaacatggtgaaaccctctctctactaaaaatacaaaaaattagctgggcatggtggtttgcgcctgtaatcccagctactcgggaggctgaggcaggagaatcacttgaacccaggaggcagaggttacagtgagctgagatcacgccactgcactccagcgtggacaatagagcaagactgtgtctcaaaaaaaaaaaaaaagtagagaaggtagttagataaagttggacaggacagtggtgtttgttgttggtggatatttggattgtttgccattgagggtttgatgaatagtgtggatatgaacatttctatattgcttttggtgtacatttctgtttggtatatgtaactaggagtggacttgctgggtcataagttgttctcactatcttcttctatcttattatcttcttatatcttgttagatatttccaagcagtttttattgttccatgaacctttatttattgccaatatatgaaatgatataattagaacaatgtagtaaatgtgtgtcatttcctgtgttgatgatatcaggagtcttatgagattgccttaaataattgggatttgaaattctggatgtgctttttctccactggtagctattgtaaatataattttgtctcttaatttctcttcctagtattcaaatgttgagcactttttaaaaatttgtatttatttatttattttgagatggagtctcactctgtcacccaagctggagtgcagtggcgcgatcttagctcaccgcaacctctgcctcctgggttcaagcgattctcctgcctcagctgcctgaataactgggattacaggtgaataccaccacgcccggctaattttgtatttttagtagagatggggtttcaccatgttagccaggctggtgttaaactcctgacctcatgatctgcccacctcagcctcccaaagtcctgggattataggcgtgagccactgcgcccagcctgaacacttttaaatagtgtttctttatgtttgagaactgtaaaactaactgtaacagtataaaacgtgatggttgcacaagtatagttggaaaacttacctggaaaatggcagaaatccttgatgtcatctagatcatgaaggggaaaaatgggacaaacatgaagtcctgaatagttaactttataggaaaggtcatgctaagtgaaatggtacaggaaaatttttaaaatgctgtatgaccctcaggtgtgttttgttcaggattgtacaagggctatactttttttctttatttctttgtgtaaagctgttgatcataccttaggatactgaggaccaaatatttgaagagaatttggaaagatttagaaaaactccttttacacaaaaggagtttaaattataaagctggctgaaaaacttgaaaaaattacaaactttgaagttttgttttatgtccatgaatagattattattatcttaaaaataaattttctggctcaataaggtatttatcacaactactataatattctagagccaagatttaatttttgggtttttttttttttttaaataaacatccttttgtttttttaagacaaggtcttactctgtgatccatgctggagtgcagtggtacagtcttggctcactgcaacatttgaccctcgggctcaaacagttctcccacttcagcctccctagtagctgggactacaggtgtgtcccaccagactcggctagacggggttttgtggtattgcctaggctggtctcgaactcctgaactcaagtgatcctcctgccttggcctccctaagtgctgtgattacaggcatgagccactgcatctggccaataaatgtcttttgattgagttatatgttatgtcttttttttgagacccagcctcattctgtcaaccaggctggagtgtagtggcacggtctcggcttactgcaacctctgcctcccaggctcaagtgattcttctgcctcagcctcctgagtagctgggactacaggcgcgtgccaccacgcctagctaatttttgtatttttagtagagacaggatttcaccatgttggccaggctggtctcgaactcctgacctcaggtgatcctcccgcctcagcctcccaaagtgctgagattacaggcatgagccactgcaccgacctatgttatgtcttccttatgttaactgattttatcctttgttagaaaacaattgttgtgacaagtggttttcttttcatttatataattttattaacatcttgtttaccaaacacagtatacaacgaaggttaaaacagttattgtgagatgactggcatgttaattagagcctccctacgtgtgtgtgggtgtgggtggatgtgcttttggagagactaatgcagagcaagggacagtattttgagtgcctctttggcggtgggtttttttttttaaatgacaagccctcaaatatgtggtatgtttaagtcttatcagttatttagatgtagtcacatttatctctgtggaaaatataaaatacaataatttgtatattgtaaagtaatgtcatttttaattttttgattagtctttttcactttcttgaaaaattcagaagaaaacattctgaatgcatctgtttgtcagttttgtccgtgcacctttctcagacaaaaaaataaaatgtacgtttatgatgatgaaaacagctgcagtgcatacttctgagagtcatttgtcaaacgaagcagcaatagaggaaaaatgataatacaccactgcactattaagtataaaactgctgcaattggtgccgttttaaattattaaacactgtaaatgccataaagttaattagaagaggaacaaactctacaaagataaatgtgttttcagtatgattgttaggggagggtacagtagaaaccagtgaatagagaggaaatttatttctggcaggactctacacatggaactgtggctgaactttttaccctaattacctcctgctaatgcctgcagcgggctggaatcaaagtggtgcttcaggccctggaaattctctgatgtggcaaacgtttgttgtgtgaggagggtttcttaagaaaaagcagaatattgtgacaggatttaaaaaaaatttctcagttaccacccacctcacttgttgcctacaaaaatagagtaattgtttgcatctgtgtgtgcttttttatcccctaagaaataactgttataaatcaatgtgacatagatccagtgaactgaggcttgcctgaggtaggatttttttttgttttttaaagtttctcctttaattgaaaatttagattccaaatgtaaagaggttattttttataattgagaagaaacattctatgcatttttaaggagaatttggatcttaaagtgtgcttttcaaaatgaattctaaaaacttttgtagtatcaaactgataactattaaattgcttaatcctggaaaaagtgggaatttccagtttccattattagttctccatctgagactagaacctaaaagacatttctctaatctttgtgaaagttaatatcattccacttatgtgtcacaaaaggtttggccatgtatgcatttttgaaataaaaagaattagttctctaaaagcacctgcttttcaacttctgcctttaaaggcagtgtttctatacaatgtaaaatacaagtaccatgacaagtcattttatataatctatttttaaaaaatagagataggggtctcactgtattgcccaggctggtctcaaactcctgagctcaagcgatcctcccacctcagactgccaaacagctgggattacaggtgcgagccactgtacctggcccattttatatattctaaaagaatccaattttcaaatagtctgcccttgtgcatctgtgctgtcttgtgtctccagctccagcccttatctaatcttcttgaaataccttttagataattcttgaaaagcactaatagcactttttttataatgcaaataaaatcatgtttttatgttggcaaaaatttattttggcagtcttttagttggatgtcctaaagaaatagttttaatttttaaaagcagaatgctgtgagttttcttgatcctaggcaataagaattgtagtgaaatcccaaatttctttcaagattgtgtcagaaactcacagttgctgtggttacagattgcttcattataaccttagtattttgcattttgcacacttatacttttgcattgcatctgtgaccattcattcatatagtagttttgtgaattgtgaatgagggctatttgtttgaactaccaagtttcaaaattatgttacaaacaatttatttttatttcgttcggtacatatgtttacaaaaactttaatcagtggtaaggcacttatatattttcacttcacgtattctttcaaaactgtaattatccacatttgatataatagatatattttgcaacatttggctttgtcatttgacgccccttcattttccgctcaattccaactgcctttacaagaaaagccaaataagaaaacattttacttctctgtctactatgaaaagtaatctgtcaaaacgtgaaactactttttaaagctgtatttatatctgtaggtatttggtgcaatttaagttatatttcactataaaataactgcatattatcattagaaggatttaaatcatcatgtgatatttttctgattctaataacaggaaagagaaattatactaatgtggctttatcacaaattatgtaatataataacatttatgtaaaatgaatgtaaatattcttactagttttcaaacaaaacattttatggtacaagaggaataattttgttgtacttcaataatatgtcagatttcttagaagtattaatttagaacaggatattttattgtcttcttaataaagataagcaaaagcttagatttttctgctatcattttaagaattgacaaggaaaataattgactataaatttttacacatatccttctctaaaatgtttcctgttctgtcttgatataacaggttgttccttgattttgagaattagactttaagcataatctattaattttggctttacttcatttctcagcatgtctcaaatgctgtgatgaactttggttactttgaaatgtttagtgaagtggtttctattgatttcatatgtgtactcaaactaatctacattggtagattatcaagttttaagatgatactagagtaataaaactgggcatactctttcacagtatagtagtatatttggcctcactgtgcttgcttggcagaagatggtataattaacatctttttatgagttgagctagactttagtatcctcatttcaagtaccccatgtttttttgttagctatggttgtgtgtatctgttaatatgaaaaatgactctgtatttttttgtttatcataactgataaggagttttaagttatattgcttttagggaaataaatcccggcaacatcttgctttttgtggttgttagtgcttctactataaccaacttataaattttccctagtatattcttttagttttcaaaagttccttataatagtatgactcaaaactaactgtacatgatttttagggaactttatgatgtatttctttatcattaactaaaattttaatgtttaatttttaactggtctgttttgcctctctattcttctgtattcctctgccagcagtttctgcacttttgttatctatcagaagaaagcgataaaataggaaagtacaatagaatcttctaatggacattaaattcatatatcttccaaaattaaaaaataatgaacaatttattaatatttttgctattaaagctataaatatatttttcttttacatgtggatttacaatatgagatttttagtatcctgaattactactttcaaacagtacactgtaacagttatgctattattatggctgattatattatctactacatgaataccgaaggcagatttgttagttttttctttggttatttggaaacctgatgttactgaagtcaaggttgaaacttcagtcttcttttacttctcttcttcatctataaatagatttcctaatcaaccagtaaatgagtatcagcaacttaaatattacatgttttagcaaccaaaatctttgctattgttagaaacatttccactggtagtttattgctgaatattaaagattaaagtgttccttttttaaaatttgaagattgaatcaaatgtttaaagaaaagcttttcttatcaggccatggttgctgcaataaaagaaagaaagagaggctttcctgtataaagttttacctacatcatagggttattggaaaggttaaatgaaatagtacttgtaaagcctttataacaatgggtggtatttatcaaatgtacaatattcatattctcgtgatgaaattatagatattatacagcagtaacagatattagccttattagaaaagcaagattcacaaaaggtagaatgtcaaacattttaggatgtttgtttcagaaatggaattttcccaagtatgtctcctgaatttctcatttagtcattaattgtttagacttttaaatgaattttaaaaaatggattctctaaaaaaattttatcctctcagcttttttgggagatttttagaggagttttagggtcacagcaaaattgagtggaagatacagaaagttcccacatatctcctgcccgcatacatttatagcctctgccattatcaacagtccccactagagtggtacatttgttatagttgatgaacctacattgacacattgacacatcattatcacccagattccatagttcacattaaggctcactcttggtgttatacattctgtggggttggataattgtatcagacagagtgattaaatcttttaacagatagttaacattaattctcttaattcttttcttaatttttaattaattcttttaacaagtagtactaatgctcaacatacaacagtgagcgagacttaatctctgccctccggaagcttatacggtagttctttttagcgaaagaacttgtaagtccgaaaaatgtacagatggcattaactagagtgtttagttctgttgtttgcgttccttctttaataatgttttaatatctccacatagttaaaaaaaagaaaaaatggaaaatatcctggaaggtttagtaagcaattattttctttattagaacaaactgttgtttggtttgaactctattgtcattggccttggaaatgttggaatttttcattaatatggattattaatattatttacagatatctcacatgtatattgaattatgagttgtcatatggtacttttagatggagtcatttcctttgaggcaagcagaaaaagtgaaatgtttcccatgttagtgttttagttataataacctaaacatagttttatactacttcatgttagatcaagttatgtagaaaagtaattagaatatgtttcacttgcacctcagtagattaaaaccagtttagaagttttaaaatgtgctaattctttttgacatttgttgatttgtctgtttggtgaaggcagatcctggatttcagtttagggaagatgatacttaaaagactgacaaacttgtactttgtgttatcaggaaatgggacctgattatttcttggaggcttggaagattttgctgcattgtcaaatgattgcactttaaccttatatctagtagaaattttactttccttaggtgagatcagagtagttgaactgtagatttgtatgtcaaaactcatagtagtaggtgtatattcaataaatagatgtaacaaaagatggcaaactagctgtcctaaacatccacaaccttgtttaagcctttttatattcagcagattatcatacctcctaattcactagaactttatttatttggaatttcctgattctttcagttaagccaaaaactgattatttggtaacatcagtaaaattgataaccctttaatgagactaactaagagaaacaggagacacaaagtactgatatcaggaatgaaagaaggggcatcactacagatcttatgatcaataaaagataataaggtaatattatacaacttttatgccaataaatttgttaacttacatgaaatggaaaacctaactaattggaaagtttttggtaagtgaagaacaatcagtagaataattttcctgggagcagtttaaaattgtaagcaaatatttcacaatacttttttttttttttttttgagatggagtttcactcttgttgcccaagctggagtgcagtagcacaatcttggctcactgcaacctctatctcctgggttcaggtgattctcctgccttggcctcccaagtagctgggaacaggtgcgtgccaccatgcttggctaatgtttgtatttttagtagaggaggggtttcaccatgttggccaggctggtttcaaactcctgacctcaggtgatccaccccgttggcctcccaaagtgctgggattacaggtgtgagccaccgtgcctggccacacaatactttttaaaaattcaattttaaattaaaatttaacatttaaattaaaaaattttaaagcttatttttcccatgaaggaaggccataaaacagtgatacaagaactcagggaagacatggcgagataaaccccacaaattgatcacagaattgatgaattgtaaggcatggaagggagaatagatagaaaatggaattaaatgagagactgaacaaaatgggaagaaaatcacaacatgtgcatagttcccgaataagaacagcaaagcattgtgattgaggaaatatttaaggtaaaaattaagaaaactttatggaaataaaatgacttcatttgatgtaatgaaatagcacagcgtgtaccaaggatagttgactcagaatggtcaattccaatatatatcattgtaaagtttctgaatttcaggagctttaataactcggaggtggtgaggtgggtgtggggagtgaagagggagtagtggggattaggctgatctcatatttccccacaacaactagagcaaatactataagacccccgagaaagatagtgaaaagcagcccaaattcacttgaaatagaaaggtataggttagaggtcagcaaactttctcctgcaagaaatattttaggttcattggatgatatgttcactgtggcaactaaactatagacaataaagaaatgaataggttcggctgtgtttcaataaaacattatttacaaaaatagcagtggggcaggattttgggcatagtttgttgacttctatataccgccattttggaaatgtttttctagacaaaatctaaaaaaatattaatcatgctgtacttatgcatggtttttgttgtttttattacagacagggtttcattatgttgctcaggctgaagtgcagtggctattcacaggcatgattcatggcacactgcagcctcaaactcctggcttgaaatgggctcaagtggtcctcctgcctctggagtagctggcactacaggcatatgccactgtgcctgtcttatgcatggtttttagtggaggaagactgtgtgggcgtagtagaaaatagtattgtataagtagataatgtatgtatttatattatatgtatattacatgtatatatgtaaataaactggcagcccatatctgtttcttgtaacatttctttcataatttgaattttcattgtatttgtttaccattgtggaacattaaacatatttctttgtattataacttaatttccagtccttaaaagaaaactcagctaattattttgaaacctccttaaagatagtctttctaacacatctttgtgtttaatcacaaataaaggaaacttactttctttttttcaacataatgtattatgtctttgcgtcttatgttgtctgttagatctttcttgaagaagaatgtctgattccaaccccaattgtaatattacctcctgtttttgtgtggagatgtcacttacccctttgtgcctggttacctctctataagttgtgcgagtgtcggaaggtttcataacccagtgtttattgagaactctgcagaagaaaaatgcagaataaagttattaactaggctcatcacaggtttagcttttaatatggttacgtttccattttcttttctttttctttttaattacttaattaaaaacaagaccaactggcttttgttctttaggagccaaatgagaatacaaataatgtaatactatcaaaaattttcctcttaaatttaaagcattagattcagtaacacatgttgaaggttgtgcagctttttcccatttaaaaataagtgtttccatgcttcttgcaatttgtggtagattttaaatgtctttgctattttgtgtttcacttatacatgcacattcttggaaaatgtcactttctcaaatactttgttccgcttttcctaattttgtttcaatctgttaaatatcatgaatgaaaataataaaagtctttgtaaaggaaaatggtattaatgtttagaattttgaaatcataaaagccatatttcacattgctttaaagtgatgttcattgtattgcattaaaaaaaaaaccctctattttgaaaacattgtccaggttaagaatggctatgattctaagaaaatacccaaatgtaaagaaaaaacatactgttacaaataattaaaaaatagatgagagacaaaatttaaatatttttgttagggatttatgaaacttgagttttggaattgaatttaatattgtattatttgtaattcttgtttttcatcaagcataaaagatccttttgcatctgtctactataccattttcaggaggtatttaaattttaaagatgcagaaggtacagtgtgaggctaccatctttcatgcattataatttttaaaaagctgaagtattcaacatcaaacttagtctttgcaaaaagctcaaggcacttagctcatttttcattctatagatgcaaaaaacctagtttgtgacaaagaaaatgaattgttgatcctatgatataaagatataattacacaagaatacttagttgtacatagctaaaagtcttatttaattcctgttttttgacctcttcatgttttggctcctttagtggttcatttgactaggcctcactgcattcttgacttttgtcttacgtagaaaccgttggatctgaaacagattgtcagaaggtttccccgtgtttacaacatgtttggtagtatttatatataaaaagattcctaagttatgggttgagaattctcatgattacttaaccaagtgatgtggttatgtacatttggtcaaatcttttgacaggttaacctcaattaattaagaacaaattactgatatgacttgtgaaaattaaaataacttttgattaaaattgcttaatgctttgtaggcttctctgttttatcatttcaaaaactctccctattgtctcaataaaagtgagttagaattccagaaatgttagtgtgttacagaacttgaacaatggaggctcatttggttaaatttgtttcagaatagattatattgttaaaattttaaaaattatttaaataaatgaaaattgtgtaataatttttcatatactactttaagtaaggaacttaatttagtagatttaaatgtagcatatataaatgaagtcataattttacttatactgctgaaatttaatcaatgtcattttgaagtagtataatggcagaaggactgaaactttattatgtatctattaaaaaacccttctgcgtctttgaggtcacactaaatctaaagatcattttgttgcaaaagagagactggatgggttatctactggtatataatgtattagaacatatttagcatattagaacaacatttatcttctcatactttttttttttttttttgagaccgagtctcgctctgtcactcaggctggagtgcagtggcacaatctcggcttactgcaagctctgcctcctgggttcacgccattctcctgcctcagcctcccgagtagctgggactacaggtgcccgccaccacacctggctaatttttttttttttttttttgtatttttagtagagacagggtttcactgtggtctcgatctcctgacctcgtgatccgcccgcctcggcctcccaaagtgctgggattacaggcatgagccattgcgcatggcctatcttctcatagtttctatgggttaggagtccaggcacaatttaactggttcattaccttaggtcttacaggctggagtaaaggtctcatctgagggcttgactaggggagattccacttctagccttcctaagggcagttcttaagggctgtctgcagttccttggcatagggcttccccacatggctgcttacataatcaggctcccaaaaagagtctctagtgatggtgtttggggagactggggaccagcaaatggaagatggcatgaggtagcctttcgaggtgctggaaatgtatttttctgtctgtgtggagttataagggatatatggactttatgaaaatttaccaaggtgtacactttagatttatatactcgtttttaggtatgttatacttctgtatatctttatttaaaagtaattgtaaaacatactttaataaataactgctagttacttttagattttttgatatccttttctgctttggaactaattttttagttaatatgactcaacaaaagtaaatgataggtatatcctaccactgctttaaccagatcattggataataaccttttaaaataggagatctttgattgcaatggaatttcagctttatgtttttttggtagtggacaaccttatacatttggtgaattaggatacttataatcattaaaaatctaaggttactactacataacgtatcaaaaaatagtggcatgaactccttatactcaggttaacttctggcaccaagataccacctgcctatgtggtgattaaaaaaagaaagtatactagaacaattttttttttcaattttctatttagaaccctgactttagctagttccatgtccttttcttttgccaatattctgcatactctacgggacatgatcttctgtgattctacattgtgggttatagttcctttctccacttatttatattctcatctaagtaagcagtgctcacatttgcttactcctgagtgtgctatcttttctttctctactctaacgttaagtttctaagctctttcttctatctccttggattccaccattgtactgaaaatgaattcctccatatttacaggctggctttcatttgaaagataattatttcctaataatactgactttgttgggttttgcattctcttagcttttttttttttatatttttatttttatagacagggtcttgctctgttgcccagactagagtgcagtggcccaattatagctcattgcagtcttgaattcctgggctcaacgtatcctctctcctcagcctcctaagcagctaggaatgtaggtgtacaacaccacacccagctaatttttaacatttttttatagagagagggtcttgctacgctactaaggctgatttttattttttatttttttgttacttattttatatagtattagtatatatttttaaaaattggctaaaaaacttatacgtgcccttttcatagtgtctctattaatattttgttgttgttgtttgttaatttttttttttttttgagacagaggcttgctctgtcacccaggctggagtgcagtggcacgatctcggctccctgcaacctctgcttcccgtgttcaagcgattcttctgcctcagcctcccgagtagctgggattacaggcacacaccaccacgcctgagctaattttggcaatttttagtagagacaaggtttcaccatattggtcaggctgatctcgaactcctgatctcaggtgatccacccgactcggcctcccaaagtgctggaattacaggcattgagccactgcacccggccatactatttgttgaagttaagaatatatcccatctccatatttttggcaagatgtgccctcttgttcctctccctacactcagtcatactgccatttatctaccttgtgaccagtatgacagattgcattctttttacatacaggcttatattagctatttaaagaaacaaggactcccaggtcatttctaattcttactttctaatcttaacatggctgtatggacagtgttgcatatccttttatcatctgcactgatcccttttcccgactctatgtttttctttatgcatattacttattaatctctaacatttgatttattttactcatttatgtgtttattttgtgttcagtaggtgtctttacctactagaatatgttcaacagtgggaaggattttgccctgttttgcgctcatagtgcctggcacaaagtatacaactaatatacttttgtgttttttgagacggagtttctctcttgttgcccagtctggaatgcaatggcgtgatctcggctcaccgcaacctctgcctcctgggttcaagggattctcctgcctcagcctcccgagtagctgggattataggcatgcgccaccacacccagctaattttgttttttttagtagagatggggtttcttcatgttgctcaggctggtctcgaactcctgacctcagctgatctgcccgtctcggcctcccaaaatgctgggattacaggcctgagccagcacacctggccacaactaatataaatttatcgaatgaataaattaatgagaatataaaaggcaatagttccctctaccattctgagattgaggcctaattttgacttaagattcattgttacttccatattgctcaaaataatttcattggtgtttactaacccattttagatgaggtgttaggatataccaacatcacatacaattccctgtcttcccagtatagttgtataaaaaaacttcagtttttctgttttgttttttttaaaggtgctgtggtctgtctctgtagaagtagagtttttcacttcatgccaacctgtaaattttgcttgcccttggttcagatacctttgttggtctaactaagggggagggcccttgtatcaagcatgaccatctaagactactggcttatcatgggatgctgagtaggacagttctctttatgtcagttgtggctggcagatcttttaattgacctgatggatatcataagattgcaaaggaagaagcaggcatctcaagctgggaggatatcattgtagtcagtgagtagacgtgaggatggaatagagccaagtagatagaataccatgagtaaaaaagttaataaaggtttaaaggctgcagtacaagttgtctgaaaggggagaatgtaaactaatggtttaaaaatgctccaacaaggctgggcacggtggcttatgcctataatctcagcactataggaggccgaggcaggtggatcacctgaggtcaggagttccagaccagactgaccaacatgttgaaaccccttctctactaaaaatacaaaaattagatgggcccggtggcgcatgcctgtaatctcagctctcaggagcctgaggcaggagaatcgcttgaacccaggaggcagaggttgcagtgagccaagattgcgccattgcactccagcccaggcaacaagagggagactccgtctctaaataaataaatagataaccccaacaaacaaacaaaaacctgagtccatctcgtgaaggtctttatttgcttagataaaagtttgaacttcatggcagtggtgtgtcattgaaagctttagaaacaggaatcaaatgattagagagaattgtttagggagattactgtgacaaggtggatttttaagttgtaatgtttgagtgtgatataataaaacagaccacaagggataaattcccattgcttatgatccttaacagtggccactgctcattacactctgtttccaaacatcttgttttcccttcagttctcctggtttctgcttcattctaaaacatttattgacggtaaactatgtctaagcacatgcctgggcatgcaaaatgaataatatactattattggcttaaagaagatcacaatctgatggagacttaaaaataaagtataaaaaattttgaaaatgctatcgttcctagaggttccaccctgtgttctattctcttggttacatactccctttctacttctttctttctcttttctttttcctttttttttttttctctctctctctctttcacaaagtctcactttgtcatagctcactgcaaccttgaactcctgggctcaagtgattctcccacctcagcattctgagaagctgggcccacaggtatgtaccactgtacctggctaatttttttttttttgagacttagtctcactctgtcactcaggctggagtgcagtggtgacatcttggctcactgcagccccaaccttccaggctcaagcaatcctcccacctcagtctcctgagtagctgggaccgtagacatgtaccaccatgcccaattaatttttaaatttttttgtagaaagggggtcttgctttgttgcacagactggtctcaaactcctgggctcaagtgatcctcctgccttgatctcccaaagtgttgggattacaggcatgagccaccacacccagccccattctacttctttatcagttttttcagtcaggatcaggtatattacttatgtcaaaagtccttttttattagtatggttgcatatgtatacacagggatccccactgacttcctgttttgtttaatagcatcaccaagttctcattcagattggctcaaaacctcaatgttgaaataatctgtactctgctgttactgggtattatataaatgtcaagttcctgttagctgatggcgtttgtgagttgttctatatggtttttttgtctagtctttctatcagttgttgagagaagtatgttgaagtctttcctattataattgtggatttgtctatttttcctttcagctctacccatttttacttcagataacttccagctctgttgttcaatatatatacatttagggttgctttgtcttcttgatgtattgacccttctatctttattttcctctctgtctctgcttattttcttagctccaaggtctactttatctgatatgaatcttgacagcctccctgcctccctcccttcattccttctttccttcttccctccctccctctctttctctctttctgttgaggtgactttacataatataaaagttaccattttaaagtatacaattcagcagcatttagcacatttacaatgttgtatcaccacaaccactagttacagaacattttattcacatcgaaagaaagccccatacccgttaaacagtccctccccgtttcctccttcctccagccactggcaaccaacaatctgccttctgtctctgtggattgacctgttctgggtatttcatataactggattcacacaatatgtgaccttttgtttctgacttctctcacttagcataatgtttgggaggttcatccatgctgtagtgtgtgtcagtacttcatccctttttatggccgaataatattacattgtatattttgtatacattgtacactacaatttgtttatccattcatctgttgagagacatatgggtgtttctactttgtggttatgatgaaaatgctactatgaacattcatgtagacgtttttgtgtgaacatatgcttgcttcctcttgggtatatacctaggagtagaattgctgggtcgtatgataattctatgtttaactttttgaggtactgccaagctgttttccacaggagatgtaccattttatattcctaccagcagtggaccagagttccaatttcttcatattcttaccaatacttgttattttctgattttaatttttaaattatgaccaacctagtggctgtaaagttatatttcattgtgaatttgatttgcattatcctaatgactaatgatgttgagcatcctttgtgcacatgttgaccatttgtatatcttctttggaaaaatgtctattcaattcctttgcccactttttttttctcattggaatgtttggcttcttgttgaattacaaaaattaacaatatattcagaatattagacccttatttgatatattatttacaaatgttttctcacattttgtggttttctttttactttcttaataatgtcctttgttccacagaaattttaaaatattgatgtaatctgatttatctgttcattcatttgttgcttatacttttggtatcatatctgagaatcaattgccaaattcaaggtcaggaagatttacctatttgtttgctcctaagagttttatatttgggttagaactattttgagttgggggctagggtttcccttcattcttttgcagagaaatatctacttgtcccaacataatttactgaagagactgtcctttcccccattgaatagacttggcagctttttcaaaagttaattcatcattaatttatttctggactctgaattctatttcatttttggaatgtctaatgctaggccagtttcacagtattttgataaccctagttttgttgtaagtttaaaaatgtgagtcctccaaatttgttcttttccaactttgttttggctgtttggtgcaccttgtacttattacatttgtgtttaggattggatttctcatttctgcaaaaaaggccactggaatttcgaaagatattgtattgctgttatgaatggaactgttttcttcatttgtcttttggattgttcattgctagattttgcgtgttgatcctgcaactttgttgaatttatcagttctggtacttttatagattatctggaattttcgacatataagaatatattatctgtgaatagataccttttatttctttttattgcctaattgctttgcgtagatctttcagtacagtgttgaataatagtgggcatccttgtcttgttcctgatgttaggggaaaaactttcagtttttctttattgaatatggagttagctgtgggtttttcatgagccatttatcatgttttcaagtttccttctttattttttttttaagtcagggtcttgctctgtcacccaggctggagtgcagtggcatgatcatagctcattgcagccttgacctgcagggctcaagcagtcctctggcttcagccccctgaagtagctgggactacaaaaaaaaaaaaaaagtactcttgtattagcagattggctttaaaccaggacagtccttgaatgtgtagtaatgccatctacaactctgccttagtcttcacttcccgcttgagatgagccagaggctcagccagagatgcaaaacgagagtccttgctgtttttctttgagcaaatgtttggccctgtgtatgagtgttttagtttttattccccagtatattagtcagtgtatataaacacagatagacacatagatacacacaaaaccgttttaaggaattggtttgtgtaatttgggggtacagcaagtaagaactaggccaggctagcaagctgagaggctaaaaactgtcagagaaggattgatgctgcagtcttgagacagaatttttttgaaataacatgtaatttcacaaactgaatctctgtgttcagttcttttttttttttttaatctgctgtcttttaaatctctttattcatttccttttaattctggaaaatgtactgtacttcacaaattcagttttctgcatgaactagtctatttatagctccatgtacactttctgtttttactacttttttgtggaggggtagtgtgcagaggagagtaatggacttggttgggtgtttattatttgcttgaggatggtatgttttctgtattcttatgaagaaaataagacttattttttctcccacaattaaaaaaagtttataaagagattttctctcaaggaaagctattattataacttgtagctcaggttcaacagcaagtggtgcctagtactggtttttaacaaatatcaggccgggcacagtggctcatgcttgtaatcccagcactttcagaggtgcatagaagaattgagtgaaaagtacagtggtcttctttcttcttccttttcctcctcctgttccttctttcttcttgacaggctctcactctgtcactggagtacagtggcacaatcatagcacattgtatgtagtcttgaactcctgggctgaagtgatccttctgcctcaacctcccaagtagctgggactacaggcgtgctaccgtgcctcgctgattttttattttttgtagagatagggtcttgctacattgcccaggatggtcttgaacttctgggctcaagcaatcatctcaccttggcctccaaaagtgctgggattagagacggaacccactgcacttggtgcctggactcccctattctttgatacatccactttctcccatcattaacacattaaattagtgtggctagtacatttgtttcagtcagtgtgctgatactgatacaactaatatccatagtttatattaagtttcaccccttgagttgtacattgtgtggcatttgagaaatgtatgatgctctgtacccactattacagtatcataaagatagttcctctgtcctgagaattccctgtactctgcttattactccttttttccctccccctaactcctggcaccactgtttttttttttttttttttttttttttttgagatggagtttttgctcttgttgcccaggttggagtgcaatggcgtgatctcggctctctgcaacctctgcctcctcagttcaaatgattcttctgtctcagcctcctgagaagctgggattacaggcacccgccaccacacccagctaatttttgtatttttagtagagatggggtttcatcatattggtcaggctggtctcgaactcctgacctcaggtaatctgcctgcctcggcttctgaaagtgctgggattagaggcgtgagccactgcgcccggccaattttagaccttttctgacaagcttcttttacttagcaatatgcattcagggttccctcatttctttttctggcttgatggctcatttctttttgttgctgaataatacttttattagcaacaaagaatgaaatacttaagtgtaaaacaagcaaaagatctatatgagtaaaacaacaaaatactgatacatgaaataaaaaaatataaatgtcatctcttcctaagttgatctatgcattcagtgcaattcctataaaaatacaagcaagttattttgtggatatgtactaagtaattctaaagtttgtatggaaaggcaatgctcctagaagataacatagaaaatctaggtgaccttgagttttggcgatgacctcttaagtacaacaccgaaagcgcaatcataaatgaaaaaatcagtaagttgggctttattaaaattaaaaacttttgctccgtgaaagattattttaagagagtgagaagatgggctgcagatggtgaggaaatattggtgaaagacacgtctgactaaagaactaaaaaactcttaaacctgaacagtaagaaaatgaacaatcctattaaaaaatgagcaaaagggtctcagcagctcgggctgcaggaggagtggcagcagccaggcagcccagcttcgcaaaggctctcggcatgctgcggcccgcaggcacctggcacacgtcctccccgccaccaggatgcccgagaggaaggtcagctccaccgaaggggccgccaaggaagaggccaagaggagatcgccgcggttgtcagctaaacttgctcctgcaaaaatggaagcgaagccgaaaaaggcagcagcaaagcattgaaaccaccatctgtaaagctctacatgttcttcacggggtgaataatttctacccaaaacttgggttaaagcttgaaacgaggaagtacaaataaaagggcaaaggggagcaaagggaaaacaggctgaaagaaactaaagaagatttacctgcagaaaagggggaaatgaaaactgaggggagtccagcctctgatgaagcaggagagaaagaagccaagtctgattaataccatataccatgtcttatcagtggtccctgtctcccttcttgtacaatccagaggaatatttttatcaactattttgtaaatgcaagttttttagtagctctagaaacatttttaagaagggaatctcacctcatcccattttttaagtgtaaatgcttttttttaagaggtgaaatcatttgctggttgtttattttttggtacaaccagaaaatagtgtgggatattgaattatgggaagctttgactgtcttgggtgtcagcttaacatttcatagatgggggatagttttcatatcctataatacaaagcatattaaatggcaatatggagtcagtcctgcatttaatgtcttgaacattttaaattacttctattcccgtggtttttttttttattatactttaagttttagggtatgtgtgcacaatgtgcaggttagttacatatgtatacatgtgccatgttggtgtgctgcacccatgttgttttttagtagaattgtttcctaaagaaaaccactctttgattatggctctccctgtcagaattgtgtccactctgtaacatcgttggttgtggttgtcctgttttcctaataactttgttactgtgctgtgaaagattaaaaaattgaatatgtagtatacatgctattcagttgtgaattggtgggatgtgtgtaacagcttatcaaattgtgaagatactggtacttgatgtcctcttaaggaaaatttgcttccaaatttaagctggaaagtcactggaataactttaaaaaagaattaggatacatggctttttagatatttgttatgtatgttaagaattgtgtacaaattgaaatgtctgtactgatcctcaaccaataaaatctcaattatgaaagaaaaaaagagcaaaaacctgaccaaagaagatacacatggcaaataagcatatgaaagatgctcaataatgtatgtgattggggaattgcaaattaaaaataacaattggataccacagttttaaagggctaaaagctctaacattgacaataccaaatgctgagaagaggtggaataacaggaatgctcatttattgctagtgggactgcaaaattgtacagctactttcaaatacaatttggcagtttcttacaaaacttaacatactcataccataagattaaccaattgccctccttggtgtttactcgaatgagttgaaacttacgtcctcccaaaaacctgcacaaagatgcgtatagcaactttattcataatggccagaacttgaatacaaccaagatgtcctccaccatgcaaatgggtaaacattggtacatcctgtgagtggaatgtcattcagtgctaaaaagaaatgaggtatcaagccatgaaaagacatggaggaatgaatgcatattactccgtaaaagaagtcaatctgataattgtactgtatgattctaactatataatgaaactgtggagacattaagttgaaatttttttttaacttctcatctcttttttgattagttctccttttattcacatttgtttgtagaggaaaacattttagtcatagtattaattcactcagaaaaattatgtgaaatgagttataaatttagtggtgaactgtacatggaagcttctttcaaaatatatgtttgaattcaaatgctagtgtttaaaagtctatttagtaactggtaatttgactgaattgaaccatgtcattattatttattgactgccattcaaaataaccttttttatttttacacatttactagagaaaaataggaaacttagacaaacattctttcagcttgagataatcacgagatagtcactagtaacatttttatatctagccttccaaatagatatgtagtcagatatatgcatttcctctaaaatgtaagttccatgaggccataagtggtcaattgaatggatgaatgcatatttaacagacttaaataaaaatctacacacaattttaaacatactgttttcttataaaatgttttttattaagtatatgtctatcacatacttttttttcatccatgttgtagcatgtataaacacctcattcctttttattgctgaataatactccattgaatggatatatcacttttttgtttgtaagttgtttttttttatactttaagttctagggtacatgtgcacaatgtgcaggtttgttacatacgtatacacacgccatgttggtgtgctgcacccattgactcgtcttttacattaggtttatctcctaatgctatccttcccccctcccccaaccccacgacaggccccggtgtgtgttgttccccttcctgtgtccaagtgttctcattgttcaattcccacctgagtgagaacatgcggtgtttggttttctgtccttgtgatagtttgctgagaatgatggtttccagcttcatccatgtccccacaaaggacatgaactcatccttttttatggctgcatagtattccatggtgtatatgtgccacattttctcaatccagtctatcattgatgcacatttgggttggttccaagtctttgctgttgtgaatagtgccgcaatgaacatacgtgtgcatgtgtctttatagcagtatgatttataatcctttgggtatatacccagtaatgggatggctgggtcaaatggtatttctagttctagatccttgaggaatgggcacactgtcttccacagtggttgaactacaagaaaaaaacaaccccatcaaaaagtgggcgaaggatatgaacagacacttctcaaaagaagacatttatgcagccaacagacccatgaaaaaatgctcattatcactggccatcagagaaatgcaaatcaaaaccacaatgagatactatctcacaccagttagaatggcgatcattaaaaagtcaggaaacaacaggtgctggagaggatgtggagaaataggaacacttttacactgttggtgggacggtaaactagttcagccattgtgattaagttgaaaatttatgtccacacagcctgcacatgaatgttcatggcagctttatttataattgccaaaacctggcagcaagttgcccttcagtagatgaatggattaacaaactgtggtatattcataaaatggattattattcttatttttcttatttattttcagtgaggtttttttttttttttttttttgtagagtcttgctctgttgcccaggctggagtgcagtggtgcgatctcagctcactgcaacctctgcctcccaggttcaagcgattctcctgcctcagcctcctgagtagctgggattacagatgcatgccaccacgcctggctaatttttgtatttttagtagagacagggtttcaccatgttggtcaggttggtctcgaactcctgacctcgtgatctacccaccttggcctcccaaaatgctgggatttcaggtgtgagccaccgtgcccagagagttttttgttttgttgttgttttttttttttagtctacctaccttcttactctggtggttcgtgtgctagttgcatgtgtagttttataagaaactgctagactgttgtccaggcgactgttccattttatattcccaccagcaatgtgtgagtgatcccatttgtctttatcttttccagcatttgttgtcactatttttaaattttttttttttttttttttgaggcagagtcttgctctgtcgcccaggctggagtgcagtggtgagatctcggctcactgcaagctccacctcccaggttcacgccattctcctgcctcagcctcctgaatagctgggactacaggtgtgtgccaccacgcccggccactatttttaaatttttatcagttctgatagatgggtagtggtatctcatagtgattttgtattttctttctttttttcctttgagacagggtctcactttgtcacccagcctggagtgcagtggcacaatcactgcccactgcagcctcaacccccagcctcaagtgatcctcccacctcaacccccaaagtagctgggaccacaggtgcatgccactatgcctacctactttttgtattttttgtaaacagggtttcaccatgttgtcaaggctggtctcgaactcctgagctcaagtgatcccgcctgccttggccttgcacagtgctgggattacaggtgtgagccgccgcgcctgggctgttttgtattttctttgtggctattcatgcatctatataatctctttcatgaagtatttctgcttatttactttgttaaaagaaggccatcaagaaggccatgtccgaggtcagctgaacgtatttctgattctcctgggatagtaatttaatgatgctatttgcaaaaactaccatcttttccattgccttttaaagcaaatgcctatgactcaatatttgatgatttaagttataatgaagactcaacctcctagttttttattaatggaagaaggagtaagaaattttgtggagaataggttgataggttttcagaattagagcctgaatttcagacatatattatatgaaaatccaaaaaagttgtagctaagtataattattttggtttgtccagtgcattccaaaattatagatggaggctgggtgtggtggctcatgcctgtattcccagcactttcgggggccaaggcaggtggattacatgaggccagtagttcgagactagcctggccaacattgtgaaaccctgtctctactgaaaatacaaaaaaattagccaggtgtggtggtgtgcatctgtggttccagctacacaggaggttgaggcatgagaatcgcttgaacctgggaggcagaggtagcagtgagccaagatccagctaccgcactccagcctgggcgatacagccagactgtctccaaaaaaataaaaaaaaaattatagattcatttagatgaaaatgtttagtgacttcttgttgatttttgtcttctatatttataatatttttccttttaagaaatctggtttaaatattttgttttatagttcataattacttaatttaaccttttaattttcaataaaagaagcattttttgaaatttgttctttaaatacttttaattaaccctcttcactgtaatgaattcactgtgtaaattccatacctttggctgttgtaatatataaaaatgaggaccttttcctccctaataaaatcttaataacttcctttatgggtatgggtcaaatgtacagtaggtaacagattgttctgataaaatttcaacacacatgctcagtaattcactataaaacaagttacttacataaagaaaaggtcagttaaagagaatttgcattcatttctatttacatttatcatgaatagtgtaaaatgcctttactatgcatttttatatgtatatatgggatcctgggcacaaattacagatttttaaagaagcatttattaataaaaattgcatccttcctgcctttcctacagcctctgatatttgcttacagtagattcagttacattctaaacttggctctaaaaacttcttctaggaacttccccccactttatgctattaggtttacctttaaggtcatagccccatgtttaaatgtcaaacacaatcctttaaaaataatccattagagctctgtagaagtcacatgaagactgtattctgtgtaaaactttcttgtggcactgttttctacaccatttttggcttgtatgatagaaaataaaagcttgtttcatgtctgtctattttagtataacaccttatggggcatgcatactgattattttatggaaagcactctcatcagcctgcccatgaggaaaattaagattgtcttgctatgttccatggaaatggtcaaggcttttcaaaagagaaaacagagaacaaaagaatatgtcgggcgtgcacccaactgtgttattggcaggaaacgtgctgactcctttgtgaatgtgtgaatttgtgaagacccttattttaaagaattatcttttcctattagttgttgaatgagaggtttttctcatatataaatagtttatggttctgacaaattttgttcagttatctataaactgagctttcgtaacatttgttttgtctgtttctaatgaaggcttgttgcatgaagattctcagttgtgacattgtatggatgatgccagtgaagtgatcggagttccagtatctagtgtgttgtagccatcatgagctcctaattgaaggcgacaggctgcttttttcccctcctagttggtcaggcaaaatgttagatttcattcattattaactcattccttatcagcagaggactggattaatttgtagggaacataaataatttttgctttgtgtcaattttagagattgaagttcaggcttatacaagattctctcccacctccagttgttccaattgtatgcatttgtgtaactaccatcataaaaatgatacactaacatttctgtcacaccaaaagtttctcgtgccactttgtgctccataccttcctcctttccctctctcttgcaacactgatttgcttcctattattatagttgtggctgttgtttttttttttaacttttcatagaagggactcatacagtgtgtagacttttatgtatagcttccctactcccacagtcatggtattgagattcacttttgttgttttatagataatttgttctttttaaatgctgagtacttttcattgcattaatatgtaactgtccattcacctattgatggacatttaattgtttctaggctttttattatggctaataaaatacctagttgtgacatatggaaaatgtatgtttaatttttttacaaactggtaaactatttttcagagtgactgtaccattttgcgtctccagcagtaatgtgtgagggcttcaattagtttgcattcttgccataactttgtactactagtttttaaaattttagtcattctattgggtgtagtggtatccattagtggtttcaacttgcatttccctgataattaaatatgttgaacatcttttcatgtgcttacttgctatctgtatatcttctttaatcaagtatctttaaacatattagggccattaaaaaactgtattcttctttttgcttctacaacagttatcatagaattatcgtcattttatttattatgaacacctttattttttatttttcatgcatgaaatcatttattttagagctaatgtaagcttagcccacattataatgttataacattaattttaatgctgacattaaaattaaacattaaaacaacattgatacagaaaataaacatatgacttaatatgtacaagagagttagcaagaaaaacttgataaataattttttttccaacttttattttaggttctgggggtacgtgttcaggtttgttacatcagtaaattgtatgtcactggagtttggtgtacagattattttgtcacccaggtagtgagcatagtacccgataggtagttttttgatcctcactctacttccaccctcctccctcaagtaggccccggtgtctgttgtccccttccttgtgtccatgtgaattcattgtttagctcccacttagaagtgagagcattctgtattaggttttctgttcttgcattaattcgcttaggataatggcctccagctgcatttatgttgctgcaaaggacacgattttgttcttttttatgctgtgtagtattctgtggtgaatatgtaccacatttttttttttttgagatggagtctcgctcctgtcgcacagactggagtgcagtggtgtgatctcagctcactgcaacctccacctcccaggttcaagcgattctccttcctcagcctcctaagtagctgggattacaggtgtgcacgaccacgcccagctaatttttgtatttttagtagagatggggtttcaccatgttggccaagctggtctcaaactcctgacctcaggtgatccacctgccttggcctcccaaagtgctagaattacaagcatgagccaccacgcccggcctatgtacgacatttttaaaatccagtcctctgttgatgggcatctaggttgattccatgaatttgatattgtgactagtgctgcaaagaacataggagtgcatgtgtctttatggtagaatgattgatattcctttggatatatatccaataatgggattgtcctgtgttgaatggtaattctaagttctttgagaaatctccaaactgctatccacggtggctgaactaatttacattcccaccagcagtgtataagcattcccttttctccacaacctcgctagcatctattattttttggctttttagtaatagccattctgactggtgtgagaaggcatctgattgtgattttgatttgcacctctctaatgattagtgatgttgagcatatttttcatatgcttgttggccatgtgtatgtcttctattgagaagtgtctgttcacgtactttgcccattttttaaatggggttatttcttgcttgttgacttatagattctgtatattagacctttgtcagatgcatagttcacaaatatttttctgtccttctgcaggttgtttgctgttgacagtttcttgtgctgtgctgaagctctttaattaagtaccacttgtcaatttttgttgcaattgttgggattgcttttggagtcttccttataaaatctttgccagggcatgtgtccagaatggtatttgctaggtttttgtttctagactttttatagcattatgttttacatttcagtctttaatccaccttgagttgatttttgtatacagtggaaagattttcatatatagagcccagtttcaatctcctgcatatggtttgccagtagtcccaccaccatttattgaatagggagttttttccctattgtttgttatcatcaactttgtcaaagattagatggttgtaggtgtgtggctttatttctaggttctccaacctgttccattggtctatgtgtcagtttttgtatcagtaccatgctattttggttactgtagccttgtagtatagttgaagtcaagtagtgtaatgcctccagctttattcttttcgcctaggattgcttttactattcaggctcttttttggtctcatatgaattttagaatacttttttttctaattctgtgaaaaatgcctttggtagtttgataggaagagcattgaaactgtaagttgctttgggtagtatggacattttaacgatattgagtcttcctatccatgagcatggaatgtttttccatttgcttgtgtcatctctgacttttttcagcagcattttgtaattctcattttagaggtcttttacctttctggttagcagtattcctagggattgtattccttttacggctattgtgaatgagattactttcttgatttggctctcagctgggatattatcgatgtatagacatgctgttgattttcatacattgattttatatcctgaaaccttgctggagttgtttaacaaatccaagagcctttggacagagactaagagttttctaggtattgaatcatatcatctgggactagagatagtgtaacttcctgtcttactatttggatgccttttatttctttctctttcctgattgctctggctgggacttccagaactgtgttgaataggattggtgagagtaggcgtctttgtcttgttctggttctcagggggaatgtttccagtttttgcctgttcggtatcgtgttggctgtgggtttgtcatagatggctcttattattttgaggtatgttccttcaatatctagtttgttgaaggtttttaacatgaatattgaattttattgaaagtcttttctgcatcccttgagatgatcatttgtttttttgtttttagttgtgtttgtatgatgaatcacatttattgttttgaatatgttgaaccaaacttgcatcccaggaataaagcttacttgatcatggtggattagcttttctgtgtgctgctggatttgatttgctggtattttgttgaggagctttgcatctgtgttcatcagggatattggcctgaaattttccttatttgttaatgtctctgccaggttttggtatcagaatgaagctggcttcggccgggcgtggtggctcatgcctgaaatcccagcacttcgggaggccgaggagggcggatcatgaggtcaggagattgagaccgtcctggctaacatggtgaaacctcgtctctactaaaaatacaaaaaattagccgggcatggtggcaagcgcctgtagtcccagctattcgagaggctgaggcaggagaatggcgtgaacccaggaggtggagcttgcagtgagcctagattgcaccactgcactccagcctgggagacagggagactctgtctcaaaacaaacaaacaaacaaaaaacagaatgaggctggcttcatagaatgagttagggggaatctctcatgctcgactttttataataatttcagtaggattggtagcagcttttctttatacatctagtagaatttggctgtgaattcatttggtccagggctttttctcattggtaggttttaaaaaatgacagatacaattttggaattcattattgttctgttcagggttttaatttcttcctgattcaattttgggaggttgttgtgtttctagaaatttatccatctctcctatgttttctagtttctgtgcatagaggtggtaaaaaatgtgttgcatgcatcatcactgttgagtcataagattttcttttcttttctttttgagacagggtgtcactctgttgcccacactggagtgtagtggtatgatcagaactcactgcatcctcaaattgctcctgcctcagccttcctagtagctgagactacaggtgcatgcagaatttaaaaaatattttggacacaaacctttgtcagatatatatttttgcatttattttttcataacatggcacttgccttttcatttttaatttttgtctgttaaacagttaaagtttcacattttgataaattgtgttttgtcagttatatctattttcatgcatttctttttctgtttaagaaataggttacaaagatttttctcaagaaataggttacaaagatttttctcctgtagtttgtccttgacacatagtttttgctattatatttttagacttatgatccattttgagtttgtttttggagcaatttaatttttttcatatagaaatctgattcttttggcaccatttgttccaaaaatgatcttttcatcatttagttatattgtacctttgatgaaaatgagttggccatacaaatgtgagtttatttctcgactcactattctgtttccttgaaatatttgtgtatgcctataccagtaccatactatcctgactattgcagctttatatgtcttatacatgtatatcatttgtatacatccatatctcagagatattatatagtgtaggttcagttcaagatgaccccaataaggcaaattccataataaagcaagtcccgttaattttttggtttcccagtgcatataaaagttatgtttggctaggctcggtggctcattcctgtaattccagcactttggggaggtaaggtggggggcttgcttgaagccaggagtttaagaccatcttgggcaacaaagcaaggcactgtctaaaaaaataaaataaaataaaaaaattagctgaatatggtggtgcgcacctgtagccccagctactcaggatgctgtgactagaggattgcttgagatcaggaattagaggctacagtgaattccatttcaggtgacagagtgaggccctgtatctaaaacaaaaacaaaaccaaaaaaggtatgtttacactatactatagtctcttaagtgtataatggcattatgtcaaaaaaaaatcaatgtgcataccttaattaaaaaatactttattgctaaaaaatactgatgttctgatacttcagtgaatcataatctttttgctgatggagagtcctggttaccccttacggggctctttcctgttcagcgtcatgaaaccaacacatcaaactgaaaatgagtatcaggcagtgcagctttattcagtagccttggaattggagaagtgggaacttagcttaacttctcagctcctgagaaacctggaagttacagatatagggcatctttaatgaagggtttgggcattaagagccaggagaggaatatgtttttcttggaaagggatggagattttcctggaatcaaggagccacctcttttctatgctttcctggtctcttctggtctttgtcattgtgattgtcaactgtcatggtgctgatgggagtgtcacttagcatggaaattggattataatgaagctagaggttcttcagaggtcgattaaactgccattgtggatttcatcagctttagctgggttagacctaagaaggaacttctgaccacagacatcctgtttcctaaaaataaatggagttaaagctgactaggaatttagccatatcacataggcattgcattggccaacaaaaatggggtagggatccagctaagtcatttaggcactacaatgggtagtattaggaccttgctctggattaggctttggcttaagggaatgttgtgtttagtttagtcttctatctaaaccactaaaactttctccatatcggcaataagcctgtttcactttcttctcattcatgtgttcactggagtagcacttttaatttcttcaagaactttttctttgtgttcatgacttggtgatgtggtgtaagaggtctggttttctgcctgtatcagctttcagtacgtcttccttgctaagcttaatcattcctagcctttgatttgaaatgagagatatgcaactctttatttcaaatgaacacttagaggctattgtaggattattaattggtctactttcaatattgctgtgtctcagtgatgaaggaggcctgaggagagggagagagacaggagaatagctggtaggtggagctttcagaacacactcatttattgattaaatttaccgtcttctatgggtccagtatgtggtgccccaaaacaattacaataataacgtcaaagatcactgatcacagatcattctaacagatataataataaatgaaagagtttgaagtattatgagaattaccaaaatgtgatggagagacactagttgagcacgtagtgttgtaaaaatggcttcagtcaacttgcttgacacaggtttcccacaaaccttcaatttgttaaaaaaaaaaaatgcaatatctgtaaagcacagtaaagtgaggtgcagtaaattaggtatgctcgtatgtaagaatcatgttaatttgcataaagattttaaagttagcttgtcatcgtctttaaaaaggcctggtaggattttgattgtgattattaaatacatagatcagtttggggagacttgccatcttaagaaaattataactcccaatccaagaacatggtatttactattatttatttaggtctttgatttattttatctgcatgttatagtttttagtatacaaatcttgcatgtattttgttagacttacatagaattatttcatattttcatgctattgcaaatactttcagtttcaaattgttcatttctatacaaacatgattgtgtatgtagaccatgaattctgcaaccttggtaaagttctagtagctttttaaagagattctttgggattttttatgtagataatgttatctataaatagatcatgttatctgtgatggttttatttctaccttgacaatctggatgctttaaatttatttatctgtaattattgcgctgggtaagacttcttatacaatgttgagtagaagtgataaaagcagacaattttgcctcgttcttgaccttatggggaaggtgtttattcttatatctgtagatttttttataggtgcactttataaggtagaagaaattctaattatggtttgttgagtgtttttctcttgaaaagggtgttgcatttttattcctaaaaatgccatatctgcatctttctaatgtgataatcatggtagtttccccccttttttctgtgaatatggtgaattacattaatagatattttgtagtaaagcagccttgcattcctgcaataaagttcacctggttttgtattgctggattttatttgctaattttttttttttttttgagacagagtttcactgttgttgcctaggctggagtgcagtgatgcaatctcggctcaagattgaaatcagtttcaagcgattctcctgtctcagcctcctgagtagctgggattacagacatgcttgcaccaccacccctggctaatttttgtatttttagtagagacggggtttctccatgttggtcaggctggtcttgaactcccaacctcaggtgatccacctgcctcggcctcccaaagtgctgagattacaggcatgagccactgcccccagctatttgctaatattttcttaatgagttttgggtgtatatttatgagacatatagatatacaagcatatattttattttcttgcaatatatttatttagtttttggatatgtgctactgacattataaaatatgttggaaagtgactcttctaccttacgaaagagttcatgtatgataggtataattttttgttttgaggattttctttgcaagaagttatgaattgaatttctttttagatcgtgagctattcaaattatctttatgtgtagattggttttggcactctgtacattttaaggcatttgtctgtgtcatcagaatatttcctgtttccttcattatttgtttgttccttctttattacttttttgaacactttgaccagagttattgattctattatctttaaaaataacaaagtttttgttttattgattccccctttgcttactcattttattttaagaaattcttgttcttaaaatatgttctgtccctctgtctagaacacagttttttctttattgtacctttacaataagtcttattatgtggaatgcatttccatatacattctagaatgagatctcatgtctggtatatttttgatgaggttttaaactatcaatttagaggtcttttaggccatgttattttcttttaggtaggtttttttgtttttgttttttttttttgaggcagtttcactctgtcgtccaggctggagtgcagtagcacaatcttggctcactgcaactccgcctcccaggttcaagcaattttcctgcttcagcctctcaagtagttgggattacaggtgcttgacaccatgcccggataatttttgtatttttaatagagatggggtgtcgctgtgttggccaggctgatctgaaactcctgacctcaagtgatctgcctgtcttggcctcctaaagtgctggggttacagacgtgagccaccacgcctggcctacgtaggtttttaaaaaaccattttattcttcttgtgtagatatattatgaatctttccttagatttgttccaagatagtcaatagttttgatatttaatgtcattttatatgatttttaaaaaaattttactaattgtttctcaatttataaaaatatacctgatgtttgtatattaaacttttatctagagaccttggtaaatccatatattctaacagttggtctttattatgaatttgcctctgtgtgtgtgtgcacagatgatctatatttctatgcacagattggtattttttgcttttatacaatcaagtttttagcaaataatgacagctttagtttctccttatagtaattacttttcttggcttatgcacaagaccttccatactgtgttgaatagaagttatgataataagcattttttcctacatcctgattttagggtcagaccttttcatattttatgggtgtttgctagtttttgttcgttagttttaaggttggtaccctttatcgtattaaggaaatgtttcttatcatgaataggctttgaagtttattagattcttttatgtatctattggtgtaatcatataatttttcttttctttcatgttttttttttttttgagacggattcttgctctgtcacccaggctggagtgtagtggtgtgatcttggctcaccgcaccctccgcctcctaggttcaagcgattctcctgcctcagcctcccagagaagctgggactacaggcacatgccaccatgcctgcctaatttttgtatttttttagtgggggcagggtttcaccatgttggccaggctggtctcaaactcctgacctcgtgatccacctgcctcggcctcccaaagtgctgggattacaggtgtgagtaactgcaccagcctaatcatatcatttttcttctgtgtagtactaatttggtgagtgatatttttttctttgccaaattttgcattcctaacttgttgacttaaaataagggatgtattatgatcatttttgggataagttttgaatcaatttactaatatcttgttaatcagaggtttgaatattatgttaatgagaaagtatagagattattggtctttcttttttaaaaaaatgacatttttctttcttttttcttttttagcacaagcccaccgtactgttgtgtggatctgtattcacttcgtactggggagatggtcaagtccattcaatttaagacacctatttatgatctccattgcaataaacggtaaggattttttcatgggtttcttgtgtaaaataagaaacatgctctcctgggcatggagaactctaccagtttcaatgactaacttagatttatttttaaaaatctcaaggaaacaccttctgaattctgttcagtggaataactctaagatttcttgatgaatatattcagacttctagtcttgatccattagggaattgtgaattcagtttagtgggatataacaagcatttgtaaaacaaaatggaaatgaatagaaagtatctgagcaaacttaaaaaggttaagtatggttttgagaaatattttaatgtagctttttatatgtattttgtgtatgctgatttatgatgtgaaatgtagttttgctgtgagaaaccaccaaaatttttgaaaagcatgttcctgaactataaaaaaatgctttaaaatatttttattccttcacacttcacagtggagctaaaatagggactagactaatttgtatcctttaaaatttatttcatttaattgctgggaaaatattcagatctatcttgaacttctatgtgacctctactgctaatgacaaattaatcacagaacattagaggagaaaggaaccttaggaatcttctatcactcagcactttccttttccgtttaagcaaactgaagccctgggatggtaaatatcttgatcattagctcttacatgcctcgtataaatcttccatgccattaaaaagcaaaacacctgaaatatagaaaataaattgttttctgccatttcagtaaatttaagtgaagcaaaagactcacaggttagagtttaaagagatgttttgaaacgtgactcagtaaggttgaatgtagaagggagggcaaagacatacttaaaaaatacaaataaaaggaaggtgggttttgatactaataagagaaatatttgaattcaagtatagaaagatgaaaattataggatgtaggaaaaatacccaatatattattgctagaataatatgattgtcctatgacacatcaagttgatcagaagggtatagaagtgttaaacaacgttattgaatgggtagatcctgcagacatatttaaccctgaactgtcctttgtgctgtcacaaacttgattacatattatttggtcaaaaaataatgtgaacacatactaaaaagtacagagaagatttttagaccacagcttccttgtatttcaattacataaatatactagaagtcaaaaaacaacaacacaaaactctttctcttatttactttcctctttaatttaaaatgtttgctccattttaaagaggaaatcaaaactgtaattgtatatcatctgaaaattaatcgcaaaatatggttgctcagttgcttaggtactttatttaaaggtttcaggtcccccacagataaatgtagtcatctatatctgaattgctcctcattctccagaaaccgtacgtatcaataaatggcacatataaaatcacctgtagcccatgcttaattcataactgcacaagagtgaatactacaactagaaattttaaatttgaggaaggtagagcttattcgggagccctagcaagaggtgatatgacaagagtgtatgatatggcagaaaggagactatggtgggaatttattggtgcagaagggacataagtaaactatggttcactcccagaagcataggctctgttggagacctagtagtttaaagcactaagggatcaaaagggtctcgggaagtgtgcaggaacagatgtatccttgaaaattccttctggcagtatggcaggcaatgttaagggtaataagtcttcaaataaataaatgtaataaagagaagatatgatgtaaaccttactgaaacaaggtagcaacactgactcagaacacttatcgctcctccattgtaaccccccaataaaacagtaatttataaagtctgatgctaatgaaaatatagataagtgtaccaatgcaacaaagtagaatctcagattagacacacacaacctctatagacatgtgacttataaaggttccgctgcaggtaagttttttcaataaatattgctccagcactcagatattgatacagaaaaaactcaagtcttgactcctacaacaaaaaacgatgccatgtgaattctaactctaaccatgaaagataataccatttatttgtaggaacattttcaattacaaattcaatttattttatatttacaagtctattaagactttaaagttctttctagcacaagttttgataatttgccttgataatttgtcatttattagttttgataatttatcaatagttttgacaatggtcttcccagtcatttgtccattaagtcttctaatttattggaatttagttgtttgtaatattcctacgttgctaatttaatgactgtaggttatctggtgatgtaggtaatttatgaattctatttccttttcttttttgggagttgggaggactggatctcactctgtcacccagactggagtgcagtggcaccatcacggctcactgcatccttaaactcccaagctgaagcaatcctcttgactcagcctccctgtagctggaactgcaggcatgtgccaccacgcctggctaattttttttaacattttttttgtagagacaaggtcccactgtgttgtccaggctggtctagaactcctggttcaagtggtcctcctgccttgggctgggattagaggcatgagccactgtgcccaatctctctattttcttgatcagtctacctagagatttggttttatttccagctgtaggtttatttatagggaagtagcgtggggtatgtgttgattatcaagttcagcagtttattttctagtttgccagggttttttttggtttgtttttgttttttttttttttgcataaccaggcattgtatttagtgaagtcaatatgaggacgatcatgtttttccttttcaatttgttaaattggatgatttcccagtgttaaaccattcttacaccctgggtttcaccctaggggtaattatctataatcctttttatatattcctggatttaatttttgcagctatgttcatgagggagattcatgtatattttctttttcttattatgccttgtctgtttttttgtttcattcattagacccttaggaaggtatttctttttttggaattttctatgataatttgtgtaggattgttattctatttttcttaaatcttttgagtttctgtcattgggttaacatacatttatggttattatgaccctttatgaaccatcctttgttaatagtgatattcttgttcttaatgtttatctgataataatatatccatttcagctcttttgttactatacgtatggtatgtatttttccatttttcagttttaagctagttgtgtgtttgaatttgttggtgtagacataatatggtatcattatccagtctgacagtttctagttttaaatattctatgtttataaaataaattatgagaaggaatgagaatattatatgcgtgtatgtgtatatagtgtgtgtatataatatgtgcatgtgtatgtgtgtatatgtacttatatgtatatctgtatgtatatgcacacatacacacaccccatatatatctgaatgtatatatctgtatgtatatacacacatacacacacataccccatatatatctgtatgtatatatctgtatgtatatatacacatacacacacaccccatatatatctgtatgtatatatctgtatgtatatatacacacatacacaccccatatatatctgtatgtgtatatctgtatgtatatacacacacccccatatatatctgtatgtatatacacacatggacacacaccccatatctatttttatgtatatacacacatacacacacaccccgatatctatctgtatgtatatacacacatacacacacatacaccatatatatctatgtatgtatatacacatatacacacacatacctcatatatatctgtatgtatatacacacatacacacacacaccccatatatatctgtatgtgtatatctgtatgtatatatctgtatgtatatacacacatacacacacacacaccccataagtactttctctttggttccattgactcttaataatggtgcatttttgtggctgtgtgtgtgtttcattatttgatattttctgtcaaacgctgtgtgtagaggaatagtacagacattggtaattagatatggaaatgccttttcttctatcagggcattaaaagggtattaagttgatataacatgtaggcaaggtggtctgaggctttagtatagtaacagaacagaaatggaatttacaattgagtaattctaaaatttgatattatcacctttataaggatattatctctacctttttgtgtattcagagtacacatacacatatatagcaaattatcacttattagtaagaagcaacccagtaaaatatatagagaaaagtttttaacaggcccagctagaaaaaaaaattgcaaggatctaacagtagtcactcattagaattattctgcatcagtaaatgaaattgttgtttttaaagatgaacaaaattaataaagcatgcatatgaaataatacattttcctttttttatactcatattagcatctgttgctcagatttaccagcttccaattttgaaaaataagctattagtttgttaaatatttagtaacaattataatctctatttgattttttgaagtaaatattaagcttggctatttatattaatatgctgcaaggatagcacaatataaagtggtggctttggatgtattttaggaattttgctttaaaaaagtgtttataactaaattattttctaattatctgtaaatcttgggcattgagaaaaatactgcttttacagattgttagtgaattttactatattgagtcaatcagaaatgacttatatttatgagtagcagttgggaaattcatccgccatttaaacttaaagtgatgggttacataaatccattttatctttaataccatgactaaaacatcactggaaaaacactttagtagatagccaacaatttattatcttctccattctttttttttcatttccttttgagacaggatctcactatgttgcctaggctggtctcaatctcctgggctcaagtgattctcctgcctcagcctcttgagtagctgggattacgggtgtgcaacactgtgctgggcttgatcttatccatctttactgtagacttattcgattcaaaaataaatgaaaacaaaactttactttgtgtattcatatttttagagacaagatcttgctgttgcccaggctggcgtgcagtggtgtgatcgtagctccctgcagtcttgacctcctgggctcaagtgatcctcctgcctcagcctcctgagtaactaggactacaggctcacaccaccacacctggctagtttatttgtattatttcttatagagacagggtcttcctttgttgcccaggctggtctcaacctcctgggctcaagtgatccttctgccttggcctccaggaatgttgggattgtaggcatgagccaccatgcctggctgaaacaaaactattaaaagacaaacattttttgaggtggtagttttttcttccatcacttttcttctagtcatctctatcttatttatatataggattttgtggtttatatttttacacattttaagaggcagaagtttctagcctaaatattataggaaatgtttaattttaaaattgtattagtaggcacttgttttcatctagatgatataatgcatttctgattccacttacagaatttcacattcactttttttctttctgttttttttctctctctaattttaggatccttgtcgtagtcttgcaggagaaaattgctgcctttgatagctgtactttcacgaagaaattctttgttacaagtatgtaccaattttttttcccttcttatgcctttgggtttatactacttacttgacacaatcagcaaactaactgtaattttctcaacagtacttaatgttttcaattttgatgattttcttgtgattctgtggctattctcattgagtaatattcttgtatgatatatattttcaactttccaacacattttctttatattactaagcaagctttgttgtgggttacctcactttctccttacatactatccttgagtttgtgatttagtttcatatagctgtttcatactttcaaagcagttgttaaattgcttaacataccgtacttttatacattatacctttacatatgagcaaaatttgtttctactaacattagtatctgtcatttaaccaaaaggtgaaaaaaatatatttttcgaataaggacttatattttaaaagagtgttcaaaaatcttcaatactgttaaataaacttatgtacttataaagctgtaagcacaatttcctttaaaacttttgtttgtttttgtaaattgataatatttgcagcttttctgtgggagtatttggcagcttgagattttctaataggagaatttgtggtaagtcctcatttgggtcaacttacagattttctgtatgatggaaaaaaatgtaaacacataaagccttggaaaatatattggcagaatcagtatagaagttggcacattttcaaagaaagcaatttagcagtttcgtattaccaattttactataatttctcaatttaaaccatatatgacagagaaaagagtgaaaaaaccttttacttagaagagagaatagtgtatgtattcttagtttttattgctatttgaaattgaaagttcttgcagaaaaaatgtgtttttagtcatcttaaaatggttaaatgtatcttaaatatacaaatgtcttcaattttcaataatttggcctattatgtaaacatgtaataatatagtgctgtggcaaaaatattgtatcttaattaaatttctagtgccacagacatgccatttcttttcctgtaaaggccataaacaataactttttattttgggaaatatatacatatatataattagagtagtagtatgatgaacacccacgcatttattatctagtttcaacaactatcaaataatggacagtctttttcatttataccccttccccaattattttgaagcatattgcagacattatagaatttaatttgtacatatttattatctacgtctgaaagataagaactttgaaaaattaccaagtgattatataattatcatccaaactgcagtcttttgatttgcacagttgccatactggacttaactctgatcaatatatgtaaacttgtaaagtcctgagcgaacacagatatatagttatcttgtccatttactaccaatgaaactcccaaggtttttgatacaccaaaaccttctttatgaaagtttagtgtccttgctaaatcttttctacaacttaattttcatgcttcttatgtcccatttaatttgaacctctcattattctcattctgttggaggtacatttttcctttgtcttcgtgaccagaatggccttttcactaataccccttctctttatgatgttttaatcctatatatctttctgggcccagtgtagatagtaattcttatatgaaatctttcttgacccctttagcttacagaaacttctccttctaaatcccttaaagataacatttcccactgtctgtttgtagaacattagattttcaacatactttgcaaatcaggatgccctggtcaaatatgcttaggaaatgctgccttctgttgagactagcaatgatgattagtattttgtctgtttaaatttatttgatacatttcttaatttcccatatttatttgataacagacctcatttgttaaccaacaccgttttggaatgcttttgtagtatgtcatctctgcctctcttgaggcacttacattctatcttgtatacattttctatctgtttgccgctagacagtattctcattgagagaaaagttactcagtttgttttggattgaggaaataaagttttaccatggaaggcataatgtgtctatcatgtccttgccaacataaaaatattaatgattttttttgttctcttaataataaaacccagttcactaaagatgaatacatttatcaaaattatgttcggtttcaaagcacaagtggttctttttcagaatgtttagttaatgaaaatgtttgtgataacagtatgtctgaaaatgtagtgcttctctgtcaacagttatcagatgaagaaaattatttatataggatcagtacagatctttataggtctgagttggaaattaaaagtaagtggtgaatattttaagaaatgatatatatatatatatatacacacacatatatacatatatatgcatagatgaatgaaatttctatcttacaagtcacattggggtaaatccagaaattttggaaaggatgagtttgttagaaaattatgtcttcataggcgtcacctcttgagtatctctctcgtatctgcagtatctctcctgtctatctctaaaggatttcccctttgaaaatgggatcttctgttctgcagacttttagtaagcacaaaacataagtcaaatttgataaaagtgaacaggagactgagttgttagcactctttcttaatgcctttcatgctttcctttttctttaatgtctttttgggacatctttgccatgtattcctgaatacttccacctgaattgctggaccactgaatagatgaaacaagttttgttaaagcattagtctcttttgtattctgtgaattcttcactacaggaagaagagatctagagggatcaacagtgtttgtggtactgtagaaggtactttaaaagtgaaatgcagcttttagttaagtcctggtcaagtggctggaggtccacagtgatgaatttttagtaattcctgacccacaaagattatcacttattctctcagagtaatgtttgcatactggctgtcatgggttgggcattccttaaaatctatttagtgtggatttcataaaatctgaaatgtatgttacttaaatggttaaaatattgaaaaaagtagtaaataaaagtacattctgtcatttctgggaataaatgttggaaataagtgtaattaactatgtatataagcccagtaatgtctttttttttcttttttttttttttgagatggagtctcactcttttgcccaggctggagtgcagtggcatgttcttggctcactgcagcctccacctcttgggctcaagcagttctcctgcctcagcttcccaagtagctgggactacaggcaggcaccaccacgcccggctaatttttgtatttttagtagagatggggttttaccatgttgtccaggctggtctcgaactcctgagctcaggtgatctgcccgccttggccttctaaagttctggaattacaggcatgagcctccatgcccggccagtaatgtctttgaggaaagatgttcttaattttaatatagttgtcagaaggtaggatggtgcatgtcttgggaagaatagggactgaaagggagtgtaagaatgtgctttggggaatctataatgtcctttttttgtctggttgttatttatgtgttcaatatgtgtacactttgttgatttgggtaatgctgcatgtatattatatttcaacatgcacttaatatgaaaaagttcagaaagcaacagtaacatatgtttgtgatttctttcttcatactctggatacagtttgatgtagcatttcaccacaggtcccccttacctgttcatctacaaatacccttaccaatagtggtaatgtattttatttcatatttctgtgaggaagtatgtcattcttagttacaaattatttttcttgaaaaccctaggggtcaaatttatgcatatgacatatgattttaggttggtaagattgatgatattctgtaaatatttgaatgaaggaatttggccgattttctttgaaattacagcttcctctaaagtgatttatatcaatatttagaacaaaatttaccatgaccagatttttaaaattaaggaacaaagggtgccacttcataagtagaaagaatcttattttcctccagtttctccccttctccctgttcctttatacagactgaaacttttgtcaggtgaatcccatgcctgtaagctggttttgcctgttagactgaaaggtataggatatagagactggaggataggatactgggatgtagggagcaggtgggacagggcatactgagatagcatttgtggtagttcatttgcctgtagcacatagtttttctacatttattggtacctagttcttaaggtaggaccatagcccatgttgaatgacaagatctccacttaatgaggttgttgttttgatcatgcaagcagttatcttctaaaatagtttgaaaaggttttgtataatacctttttagtgcattggttatatgtgaatacaatgaagggactgtaaaataagtagagacagctgtgtccatcagagcaagcatcatgggaatttgtgccaaagggtggaaggaacaggtaaagagagctgatagaggactgttaatggaacgcatccaatatgatgagaaaggagacacctttgtatttggatataaagaaaaagtcgccttgagcagctgtctgatgtggaaatccaaaacccgtgtatgattaggaaaacaaaagacaaagaccgatagatgtcattagcagtcattttcagtgttcttaaattgaaaggtagatatgaagtctccagagagatcaaaggagtgtacagtaagcaatcttgttccattggcctctgtttttacttggaggagaaaacttatttcttataatcttagtgttatttcttggttttaatgtgttcttcatttatgttaatgattaataacaaatagaacaaatggaaatgcaaagtttactttaaaatgcaaaattatctttaagttttgaaagaggagctctgcttttatgtgaagaaacaagtttgtaatatttatgagaattcattgataggttagtgtgagttctaagttcagcttacattaaaagttaaacctatctttgtttttctgagttctccataagatggaaaaggttactatgatgtttttagggcatgtgctggtgctggaatcatagtggacactcagtgaatatatatgcagtgaactaacttgtgactttttcattctctgcacacaattctcacccattgagtcttagaatggcagtactcatgaaattcattttaaactaaaaactcataaaaccttatgagagtccttaatcagctgtatgatggttaaacacatctgtgaaatggtatttaatgttttatatgcttatgtgtttttctggggaggatgttcacttttttttttttattgttgttgttgtttgtgtttttttgagatggagtctcgctctgtcgccaggctggagtgctgtggcacagtctcggctcactgcagcctccatctcccggcttcaagtgattctcctgcctcagcctctcaagtagctgggattacaggcgcatgccaccacacccagctaatttttatattttttagtagagacagggtttcaccatgtgggccaggatggtcttgatctcttgacctcatgatccgtcctccttggcctccgaaagtcctgggattacaggcgtgagccaccgcgcctagccatatgccacattttatctgatcgttagttgacagatatttagtttgtttctacttttgggctgttgtagataatgcttgtatggacactagtgcacaagtttttcagtggacatatgttctcttgggtatgaacatttagctacaagtttttgtaattttgaaatttgaatttccctgatggctaatgacactgaccatttttaatgtgcttatttgccatttgtatatctctgtccatttttaaattatttgtcttttcaatactgagtggtaatattttatattctagatatgtcacttatcagatatatctttttgcaaaaaatgttccctcattctttagattgtcttttcactttcttcttttttttgttttgttttgttttgtttgtttgtttgtttttgagacggagtctcgctctgtcacccaggctggagtgcagtggtgcgatctcagctcactgcaagctccgcctcctgggttcacgccattctcctgcctcagcttcccgagtagctgggactacaggcgcccgccaccacaccctgctaattttttgtatttttagtagagatgggatttcactgtgttagccaggatggtctcgatctcctgaccttgtgatccgcccacctcggcctcccaaagtgctgggattacaggcgtgagccaccgcacctggcctggtcttttcactttctttatggtgtcttttaaagcatgttaaatttgcatttgttttgatgaagtccaatttatgtatttttcttttgtcctatataagaaaccattgcccaatccaaggtcatgaaaatttacagtatttcattctaagaatttaattgtttaacttttttttttttattatactttaagttttagggtacatgtgcacattgtgcaggttagttacatatgtatacatgtgccatgctggtgcgctgcacccactaactcgtcatctagcattaggtatatctcgcagtgctatccctcccccctccccccaccccaccacagtccccagagtgtgatattccccttcctgtgtccatgtgatctcattgttcaattcccacctatgagtgagaatatgcggtgtttggttttttggtcttgcgatagtttactgagaatgatgatttccaatttcatctatgtccctacaaaggacatgaactcatcattttttatggctgcatagtattccatggtgtatatgtgccacattttcttaatccagtctatcattgttggacatttgggttggttccaagtctttgctattgtgaataatgccgcaataaacatacgtgtgcatgtgtctttatagcagcatgatttatagtgctttgggtatatacccagtaatgggatggctgggtaaaatggtatttctagttctagatccctgaggaatcgccacactgacttccacaatggatgaactagtttacagtcccaccaacagtgtaaaagtgttcctatttctccacatcctctccagcacctgttgtttcctgactttttaatgattgccattctaactggtgtgagatggtatctcattgtggttttaatttgcatttctctgatggccaatgatgatgagcatttttccatgtgttttttggctgcataaatgtcttcttttgagaagtgtctgttcatgtcctttgcccactttttgatggggttgtttgtttttttcttgtaaatttgtttgagttcattgtagattctggatattagccctttgtcagatgagtaggttgcgaaaattttctcccattttgtaggtggcctgttcactctgacggtagtttcttttgctgtgcagaagctctttagtttaattagatcccatttgtcaattttgtcttttgttgccattgcttttggtgttttggacatgaagtccttgcccatgcctatgtcctgaatggtcatgcctaggttctcttctagggtttttatggttttaggtctaatgtttaaatctttaatctatcttgaattgatttttgtataaggtgtaaggaagggatccagtttcagcttcctacatatggctagccagttttcccagcaccatttattaaatagggaatcctttccccattgcttgtttttgtcaggtttgtcaaagatcagatagttgtaggtatgtggcattatttctgagggctctgttctgttccattgatctatatctctgttttggtaccagtaccatgctgttttggttactgtagccttgtagtatagtttgaagtcaggtagtgtgatgcctccagctttgttcttttggcttaggattgacttggcaatgcgggctcttttttggttccatatgaactttaaagtagttttttccaattctgtgaagaaagtcattggtagcttgatggggatggcattgaatctgtaaattaccttgggcagtatggccattttcacgatattgattcttcctacccatgagcatgaaatgttcttccatttgtttgtatcctcttttatttccttgagcagtggtttgtagttctccttgaagaggtccttcacatcccttgtaagttgtattcctaggtattttattctctttgaagcaattgtgaatgggagttcactcatgatttggctctctgtttgtctgttgttggtgtataagaatgcttgtgattttggtacattgattttgtatcctgagactttgctgaagttgcttatcagcttaaggagattttgggctgagacaatggggttttctagatatacaatcatgtcgtctgcaaacagggacaatttgacttcctcttttcctaattggataccctttatttccttctcttgcctaattgccctggccagaacttccaacactatgttgaataggagtggtgagagagggcatccctgtcttgtgccagttttcaaagggaatgcttccagtttttgcccattcagtatgatattggctgtgggtttgtcatagatagctcttattattttgaaatacgtcccatcaatacctaatttcttgagagtttttagcatgaagggttgttgaattttgtcaaaggctttttctgcatctattgagataatcatgtggtttttgtctttggctctgtttatatgctggattacatttattgatttgcgtatattgaaccagccttgcatcccagggatgaagcccacttgatcatggtggataagctttttgatgtgctgctggattcggtttgccagtattttattgaggatttttgcatcaatgttcatcaaggatattggtctaaaattctcttttttggttgtgtctctgcccggctttggtatcagaatgacgctggcctcataaaatgagttagggaggattccctctttttctattgattggaatagtttcagaaggaatggtaccagttcttccttgtacctctggtagaattcggctgtgaatccatctggtcctggactctttttggttggtaaactattgattattgccacaatttcagctcctgttattggtctattcagagattcaacttcttcctggtttagtcttgggagagtgtatgtgtcgaggaatttatccatttcttctagattttctagtttatttgcgtagaggtgtttgtagtattctctgatggtagtttgtatttctgtgggatcggtggtgatatcccctttatcattttttattgtgtctatttgattcttctctctttttttctttattagtcttgctagcggtctatcaattttgttgatcctttcaaaaaaccagctcctggattcattgattttttgaagggttttttgtgtctctatttccttcagttctgctctgattttagttatttcttgccttctgctagcttttgaatgtgtttgctcttgcttttctagttcttttcattgtgatgttagggtgtctattttggatctttcctgctttctcttgtgggcatttagtgctataaatttccctctacacactgctttgaatgcgtcccagagattctggtatgttgtgtctttgttctcgttggtttcaaagaacatctttatttctgccttcatttcgttatgtacccagtagtcattcaggagtaggttgttcagtttccatgtagttgagtggctttgagtgagattcttaatcctgagttctagtttgattgcactgtggtctgagagatagtttgttataatttctgttcttttacatttgctgaggagagctttacttccaactatgtggtcaattgtggaataggtgtggtgtggtgctgaaaaaaatgtatattctgttgatttggggtggagagttctgtagatgtctattaggtccgcttggtgcagagctgagttcaattcctgggtatccttgttgactttctgtctcgttgatctgtctaatgttgacagtggggtgttaaagtctcccattattaatgcgtgggagtctaagtctctttgtaggtcactcaggacttgctttatgaatctgggtgctcctgtattgggtgcatatatatttaggatagttagctcttcttgttgaattgatccctttaccattatgtaatggccttctttgtctcttttgatctttgttggtttaaagtctgttttatcagagactaggattgcaatccctgcctttttttgttttccatttgcttggtagatcttcctccatccttttattttgagcctatgtgtgtctctgcacgtgagatgggtttcctgaatacagcacactgatgggtcttgactctttatccaatttgccagtctgtgtcttttaattggagaatttagtccatttacatttaaagttaatattgttatgtgtgaatttgatcctgtcattatgacgttagctggtgattttgctcgttagttgatgcagtttcttcctagtctcgatggtctttacattttggcatgattttgcagcagctggtactggttgttcctttccatgtttagcgcttccttcaggagctcttttagggcaggcctggtggtgacaaaatctctcagcatttgcttgtctgtaaagtattttatttctccttcacttatgaagcttagtttggctggatatgaaattctgggttgaaaattcttttctttaagaatgttgaatattggccccctctctcttctggcttgtagggtttctgccgagagatctgctgttagtctgatgggcttccctttgagggtaacccgacctttctctctggctgcccttaacattttttccttcatttcaattttggtgaatctgacaattatgtgtcttggagttgctcttctcgaggagtatctttgtggcattctctgtatttcctgaatctgaacgttggcctgccttgctagattggggaagttctcctggataatatcctgcagagtgttttccaacttggttccattctccccatcactttcaggtacaccaatcagacgtagatttggtcttttcacatagtcccatatttcttggaggctttgctcatttctttttattcgtttttctctaaacttcccttctcgcttcatttcattcatttcatcttccattgctgataccctttcttccagttgatcgcatcagctcctgaggcttctgcattcttcacgtagttctcgagccttggttttcagctccatcagctcctttaagcacttctctgtattggttattctagttatacattcttctaaatttttttcaaagttttcaacttctttgcctttggtttgaatgtcctcccgtagctcagagtaattcgatcgtctgaagccttcttctctcagcttgtcaaagtcattctccatccacctttgttccgttgctggtgaggaactgcgttcctttggaggaggagagaccctctgcgttttagagtttccagtttttctgttctgttttttccccatctttgtggttttatctacttttggtctttgatgatggtgatgtacagatgggttttcggtgtggatgtcctttctgtttgttagttttccttctaacagacaggaccctcagctgcaggtctgttggaataacctgccgtgtgaggtgtcagtgtgctcctgctggggggtgcctcccagttaggctgctcgggggtcaggagtcagggacccacttgaggaggcagtctgccggttctcagatctccagctgcgtgctgggagaaccactgctctcttcaaagctgtcagacagggacatttaagtctgcagaggttactgctgtctttttgtttgtctgtgccctgcccccagaggtggagcctacagtggcaggcaggcctccttgagctgtggtgggctccacccagttggagcttcccggctgctttgtttacctaagcaagcctgggcaatggcgggcgcccctcccccagcctcgctgccgccttgcagtttgatctcagactgctgtgctggcaatcagcgagactccgtgggcgtaggaccctccgagccaggtgtgggatatagtctcgtggtgcgccgttttttaagccggtctgaaaagcgcaatattcgggtgggagtgacccgattttccaggtgcgtccgtcacccctttctttgactcggaaagggaactccctgaccccttgcgcttcccaggtgaggcaatgcctcgccctgcttcggctcgcgcacggtgcacggtgcgtgcacccactgacctgcgcccactgtctggcactccctagtgagatgaacccggtacctcagatggaaatgcagaaatcacccgtcttctgcgttgctcacgctgggagctgtagactggagctgttcgtattcggccatcttggctcctcaattgtttaacttttatatttaagcctttgatccatttttgtatgtggtatgagataggggtccacgttcattccagtccaaatgcttttgcatttggatatccagtagtcccagcaccgtttgttgaaaagacttctttcaccattgacttgtcttggtattcttgttgaaaatcagtggacttataaatgtaaataactgttttctttaaaaaaagggctcagactttttatttgtccttgccaggagaaataaggcaaagtatcacagagagcagttcagtttttttgttttttgaaatgaattcaggtcacctctccattaggaccactttctgggaggatgccatctaaaattgcatcatgcttgtgtaccttcttaattacttttttagtaatggacaaatatagtgtgcttctaaaaattttttaccttcatttaaattgggaaatgaattcttttaacatccagttctctttgtccaataaaattgtaaacatgttagaattaggcctagtattatagagattcatgtccccccaaccccttcacttgttttcagactttacctggaggcaaagattaatctttaaaagagtcatgcttataaggttgggatggtgctgagtggcttatgttctgctgattccagctataaagcattcttttggcaagcaggaaaacagttgttttcattacaatatactgtaattcttgaggtccactgaactctaaaaatacggactcaaaaaatgaaatgaagaattgtaaactgtgtttttccttaggacccttttgtatttgtgaggttaaagtggttatcagaatttattgagagttagattatttagttttaaagctaattcaggagattctctgtgtctaatgtaacaccactgttcacaagtacttggttctatttttcatgacgaattttaaaaggggaaaaactttcttatagatcatatttatcctcatttctccagctctgaaattgtcagcggaatacatgtatacatactcatataaaattatatttttaatgaataagattaatctattcaatggtctaatctattgtgtaaatactacacaatttatattacagtatgttgtctttttataatttttagtgtgtttttgtcctatatatgtttccataatatgcatttaatagataatagtaatattacagttaacctgaagtcagttttccggaaaccctaagtattgcaaacatactccttcaaacagtagcatgaatgaacagttttttaaaaagggagcaataaaatgagaaagcttttattttgtttatgtggactttcttttagggtctgtctcttctctataagtttattattttcttttcaagacgaaaattcaaaatagatggcagtttagggagctaggctaaaaatggctgtgtactggaagtgacagtaaggtgtgcttctttagtgcttttgagcatagcaataggaacatagtcagaatgactagggagtggcagcagggaagagtcagcggcgaagaaaaccgattcttcaatttacacatccctgtaatcaagttggaggaagatagaaaataaacagtaaatatatgtcatagaacaattaactgttgttattggctagaactgcaagcaagaagaatgatattgagtgaaatgtaaatacaaaggattatgcagttccctaacatctttctgtggaggcagactttcagagttacttgtcttcattggcctcagtgaggtcaaatacttgttctttttctctcctcattgtagtatcatgtctgatagtctcatttatcttttgcctttaaattcctgaacccatcatatcatttctctctcctctcccaaaattcttccttgatttatgaatgttagacttaaaatggccctgttaacttcattctcatgtttaggaataactgtataaaatgcccagtgtttgctgaaagtgatgaccagttctttccagatttgtttcttattgggacagagttaagccaaaaggaaactaaatagagggggaaaaatgcaccttacttagctaacaaaataatgactagtgttacaggaattttatgtgagacttgaaaaaatataagcatttgatttttctgtttttctggcatcgatatatgatgcaccaacagaaaagttattaagaaatttctcaatagtgccatttgaaatttttcaggctgctatccatgtccagggccaaacatgaatcctattgctcttgggagccgctggcttgcttatgcagaaaacaaggtaagacgtggcctgtgtttggattatttgtaatggagcaagtgttgaaggattttccataaaaaatacctgtgctccatagttgattaccaataataaatgttttacttactagttcatttgctttggtttggttttaattgtgcaactaataattgaactcgtttaagaatttataaatgtttggcagttgtcattaagtccagactctgtagaaccttaattgttttagcttggttttatatagagaacttcattctattaatttgcagcattgagatgaccacagtagtggtattaaggaaagtagtttttgactttttagaaatcaggaggcaggagtaacttctgtcttcattggtagattagaaacctgggcatagaataatttaattgacaaggctaggcgtgatggctcacgcctgtaatcccagcactttgggaggctgaggcaggtggatcatttgaggtcaggagttcgagaccagcctggccaacatggtgaaaccccgtctctactaaaaatacaaaaattagccgggcgtggtggcatgcgcctgtaatcccagctactcaggaggctgaggcaggagaattgcttgagcctgggaagtggaggttgtggtgagctgagatcgcaccactgcactccgtctgggcaacagagtgagaccctgtctcaaaaaaggaaaaaaaaaaagaataatttaatttacattaactatatgctaacaactatatctaaataagggttcagccatttgttttaatagttaaatcacacatgttcacattttgttgacttcttcggttatttatcaatttatttattaaggtcatcataataagtgaagatactatatgcactaggaattttacttatgtctgatttaaggaaaaaggtaaatttgaatcttcaaaaagaaagataaaattcttttaattccatttagtaccctgcatgtgaatatagaatgaaatcttctaaaagaatattactatttttggtttcgtttttgctagttgcatagttattgtatcttgagattaatatgaattaatatgaaatagttcttgacaaaattaggatgtggtaagtaaagtagttatttggtaaagccaaatctactaaatttctagcctctggaatgtacaaaaatcaagaaactactgaagaaaattatttttctgcataaattctttgagatcttatccataaatctgtctaactactagatatgttacatcttcctgaattctgtatttatattccattttgttttttctcttgattttccagtatatcttgtaaaaatagctctttcaaattattcttttcaaacaaaacaaggcatacaagtaagtgtagtgacacaatggtatcttctaatgtttctatctgtaaagcatttcccttgagtgctggaaacattcaagacaaagatgtataaattgtcccttggttcttgtggatgtattctcacatatggggaactgcccatttggaagtggaggtaatatgtaagtagttacatattgcctttgaggggaaagaactcccttcatagatgcatagcctgaatatgcaccagttgttttccctcttcaggaatacatgttaatatctggtgtcatgtacagagaccagacaacgtagtggccttcacaaggagtttgtgagtcaaatgtcgtgctttcatctcaaaatatttctagataaatgtccttacatagtattttcataagagctagcatttattagtttctaattgttttagctttggggctgagtatagaattgtaaaattgaattaaattttggggtaccagtctctttcagtgaaaatgctctttgactataaaatcttaagaagccgtatatctttgtttagttttgagattcacagggtacacgtgcatgtttgttacacaggtatattgtgtaagggtggggattcagcttctagtgtatccatcatccagatattgaacattgtaccccataagtgatttttcaaccctcagctgcctcttccctcccccttttggagtccccactgcctatttccattttcatcatcatgtgtacccattgtttagctcccatttataagtgagaacatgctatttttgattttctgtttctgagttagttcacttaaggtaatggcctccagctccaagcatgttgctgcaaaggacatgatttcattctttctgtggttgcaaagtattccatggtgtgtataaccatattttctttattcaaataatcagctgctgatagacacctagtttggttccatgactttgctattgtgactagtactgcgatgaaaatacaagtgcctgtcctttttaaattaatgatttcttttcctttggatatatacccagtggtgggattgctgggtcgaatggtagttctatttttagttctttgagaaatctccatactcttttccatttacattcccaccaacagtgtataagcatccccttttctccatattcctgtcaacatctgttgtttttgacttatttttttttttttttttgagacagagttttgcttttgttgcccaggctagagtgcaatggcatgatctcggctcaccgcaacctctgcctcctggattcaagtgattctgtctcagcctcccaagtagctgggagtacagacatgcgccaccatgcctggctaattttgtatttttagtagagatggggtttctccatgttgatcaggctggtcttgaactcccaatttcaggtcatctgcccgcctcggcctcccagagtgctgggattataggcatgagccccagcgtccggccgtttttggctttttaagaatagccgttttcggcccggcatggtggctcatgcctataatcccagcactttgagaggccgaggtgggtggatcacgtgaggccaggagttcgagaccagcctggccaacatagtgaaaccctgtctctactaaaaatacaaaaaattagctgggtgtggtggtgggcgcctgtagtcccagctactcgggaggctgaggcaggagaatcacttgaacccgggaggtggaggttgcggtgagccgagatcatgccatcgcactctagcctggccaacaagaatgaaactctgtctcaaaaataaaaataaaaataaaaagtcgttttcactggcataagatggtatcttggtgtggttttaagttgcatttctctgaatattagtgatgttgaacatttttttttcatttgtttgttggccatttacattctttttgagaaatgtctgtttatgtcctttggggtttttattggagtttgtttttttcttgttcagttgtttgagtttcttgtagattcttagttggatgcataatttacaaatattttctcccattgtgtagtttatctgtttactctatcgattatttcttttgctgtgcaggaactttttagtttaattaagtgtcatttgtctatttttgttgcatttgtttttggggtctttgtcataaattccttgcctaggacaatgtctagaagagtttttccctaggttttcttctaggatttctatagtttcaggtcttacatttaggtctttattccatctgagttaatttttgtatatggtgagagataggggtctggtttcattcttctgcatatgactagccaattttcccagctccgtttattgaatagggtgtcccttctccattgtgtatttttgtcaactttgttaacaaaatatcagttggttataagtatctgatgttattcagttctctgttcagttatcttgacctatgatcttttttttttttttttttttttttgcacgacagagtgtagctctgttgccaagggtggagtgcagtggcgtaatctctgcttgttgcaacctccgcctcctgggttcaagtgattctttcacctcagactcctgagtagccgggactataggcacatgctaccacacctggctaatttttgtatttttagtagaaatggagttttatcatgttggccaggctggtcttgaactcctgacctcaaatgatccacccaccttggcctcccaaagtgctgggattgcaggcatgagccaccatgcccagcctatgtgtctacttttgtaccagtaccatgctgttttagttactgcagccttgtagtatagtttgaaatcaggcagtgtgatgcttcctgatttgttatttttgcttaggaccgctttggccatttgctgccccaccccattttattttattttattttattttttgcttccctatgaactttaggatagctttttccaattctgtggaaaaaacattaataatttgataagaattgtgctgaatctatagatttctctggccagtatggtcatttaaatcatattgattctttcagttcatgagcttgggatgtttttccatttgttggtgtttacaatttctttcatcagtgttttgtagttttttcttgtagagatctttcatctccttggttaaatttcttcttatatatatattttcgtaactattgtaaatgtgattgcctctttgctagatcattattggtgtatagaaatgctattgaattttgtatgttaattttatatcctgcaactttactgaatccgtttaccaaatctaagattttgtgcgtgtgtgtgaaatcattaggtttttctagatacaagatcatgtcatcagcaaagaggggcaatgtgacttctacttttccaatttggatgccttttctttctttctattgccttgttgctttggctgggacttcagtactgtgtcgaatacgagtggtgaagttggcatccttgtcttgtagtaaatcttagaggaaaggcttttaaattttccccattcagcctgatgttagctgtggttttgtcatatatggtctttattattttgagataatttccttctatgcctagtttgttaagagtttttatcatgaagggatgttgaattttattaaatgctttttcttgtatctattgagatgatcatatggtttttgtccttcattctgttgatgtgattatcacttattgatttagatatgttgaaccatccctatgtctctggaataaatcccccttgattgtggtctattatatttttgatgtgctgttggttttgattttctagcattttcttgaagattttggtgtctgtgttcatcagggatcttggcctatagttttcttttttgtggcatccttgtctggttttggtatcagatgatgttggcttcatagaatgagttagggagagtttcttcctcttttatttttttggaatagtttcaggaaaattggtgatctcttttgtacatttggtaggattcagctgtgaacctgtctagtcctgggcttgctttctgggagactttattacctactcactctcactactcattattggtctgctcagatttctgttttttcctgattcaatcttgttacgttaggttgtatgtttccaggaatttatcaatttcctctaggtttttcagattttcagtgtatagctttttataatagtttgctgatctattgtatttctgtggtatcagttgtaatgttctctttttcatttctcattttgtttatctgggtctttcctttcttggttaatctagctagtgtttatcaattttgtttatctttttgaagaaccaattttttattcattgatcttttgtattgtttcattagtctattttgcttagttctactctgtttattatttcatttcttctgctaattatgggtttggtttattcttttttagctcctttgggtgcattgttagattgttaatttgtaatctttgtacttttttgatgtaggcgtttattgttgtaaacttccgtcagcacaccttttgctgtattccacagttttggtatgttgtgtttcaagatcatcatttgtttcaagattttaaagaattgactcagtagtgttcaggggcatgttatttgatttccatatgtaaagtttccagagtcccttttggtatttatttctagttttagtccattgtggtctgagaagatacttgatatgattcagtctttaaaagtgtattgagacttgtggcctaacatatggtctatcatggagaatgttctatgggctaagaatgtatattctgcagttgttggatagaatgctctataagagtctattaggtccattgggtctaaagtccagtttaaggccaggcacggttgcacatgcctgtaatcccagcactttgggaggccaaggcgggccaatgacttgaggtcaggagttcaagaccagcctggccaacatggcaaaatgctgtctctactaaaaatacaaaaatagccaggcatggtggcgtgtgcctgtaatcccagccacttgggaggctaaggcaagagaaccatttggacccaggaggtggaggttgtggtgagctgagatcactgcactccagcctaggtgacaaagcaagactcagtctcaataaataaataaataaagtccagtttaaatccaatgtttctttgttgattttctggctagatgatctgtttaatgctgagaggagttttgaagtcccccactattactgtatttcagtttatctctctctttagatatagtatatactaatatttgctttaggaatctgtgtgctccagtgttgagtgcatatatatttagaactgttatatcctcttgctgaattgatccctttatcattatataatgaccttctttgtcttttttttttccagctgtttttgactttagagtctgttttatctaatataagtataactacccctgttcacttttggtttccatttgtgtggaatatctctttttttttcccctttacttttagtctacatatgtctttatggtaaggtaagtttcttgtaaggagcatatagttgggtcatttaaaaaaatccatttagttattctgtctcttttaagtggattatttattttatttacattcaaagtcattattaatatgtgagactttgttcttatattgttgattgttttctggttatttcgtatatttttggtttcattctttttctcttattgtttgatgttatggtttggtggatttctgcagtggtactctttgagttctttctctttctcctttgtgtctttgctttaccagtgagtttcatagtttggtgtgtttttgtgatactaaatgttgtcctttcacttccaggtttagggctactttgagcatgtcttgtagggtcaatatagtgataatgaattttctcagaatttgcttgttggaaaaaatgtcatttctccttcatttatgaagggtaattttgctggatacagtattcttgactgacatacttttttctttcaaccctttgaatctataattccattgtcttctggcttgtgaggtttctgctaagaaatctacagttaatgtgatgaggtttcctttatatgtgactagacacgattttttcttgctgcttttaggattcactctttatctttgattttagacaatgactataatgtgccttagagaagacctttttccattgtatctgcctggggattgctaagcctgttgtatctgaatgtccaaacttttgttagacttgggaagttttcatctattattccattaaatgtgctttcaaattttttctttctctcttcaatgtcaggaatacttataattgtaatattttgacactttatgtttccccagatgtcataatgtcttcgcttatttttaaaattcttttttctttatttttatctgactggattgtttcaaaagatctgtcttcaagttctgagattctcccttttgcctgatgtagtcagttttattttacttatttatttatttatttagagacaggatctcactgatcttactctgtcatccaggctgaagttcactggtgcaatcacagctcactgcagcctagacctccagggctcaggtgatcctcttgcctaagcttcctgagtagctgggtctacagatgtgtgccaccacaccaggctaatttttttaatttttattttatttttatttttttttttggtagagatagggtcctgccatgttgcccaaactggtcttgaacttctgggctcaagcaatcttcctgccttgacctccctaagtgttgggattacaggcatgagccactgtacctggccagaatttctctttgacccttttaaaaattatctgtctctttggtaaatttctcatttatattctgaattgtttttctgatttttctgtattgtttttcacagttctcttgaatctcacaaggttgttttaaattattattttgagtcctataaatgggctctcataaatttctttttgattagaatctggctggagagttattgtgtttctttggaggcatcatattttatttttcatgtttcctgtgtctttacattgatatttgcacatcaggtgcaacagttacttcttcatatttttacatttactttcgtagaggactttttttattaatgaagatatatctatagtactggttggataggacactttggtcttgattctgggtgtgtgcggtaatgtagtctgattttttttttctgtatacatcattaggggtatttattatttacttaatgaattagggtgtgattattagtggtggctgtggtgaagttttgctggagactgggatgccaggttgactggtcatcagtatgcagtggtggcagcattgggctgagtgtgcctatccttgtgccccagagtagtgtacactggcacctatattggtggttacaagtgggctgattgttggtcttccaggtagcttgcttggatgctggtagtggcaatggtgaacagtatgggtgggctggttcctgagcccctgggcagccagtgtaacatgggtgataacggtagcagtggcaagataattatttttgttcctagtggcgtgtgttgatgttggtggtggctgcagtggtctgggggttcgggaggtagtctccaggcctgtggttggagcttgcaggtaggtgccagcttttgaggcagtggcagggagataaggcccaacctcagaccccctggaggagtgcttatgtacccaaagaagtggattggtttgggcagtcccaaggaccctgggttatgagttctgtctttgggggttgaaggcagaactaggctgggtgggcttgttctcaggctccccaatgatgagagcagataccagccatggtgggtggggacagggtaatcctaggatcagtttttgggtgaggggccctgaggctgcttatggagagggtaggtctggcctcagtggccacagctaggctggtaggtggggaaaatgtgtctctttcacaccccagtcccagtggggctcaccccccagtcccggtggcaatggcatatacctgtctcacccccatccctggctgcaggagcctctgcccagctcgcaaccaagtcttagtggcaactcatgcctgctcatgtctcagtctctggcctggcagcacttgcttccctgcattggtagctgctacagccaatgctttactcgattctcagcccctagtgcgggaatgagcccagatcacaccctagtcccagcagtgacagcctgagattttttttttcctgagatggagtctcgctctgttgcccaggctggagtgcagtggcgcaatcttggctcactgaaacctccacttcctgggttcaagcagttctcctgcctcagcctcctgagtagctaggattataggcatgcaccaccatgcctggctaatttttgtatttttcatagagacagggtttcaccatgttgaccaagctggtctctaactcctgaccttgtgatctgcccacctcagcctcccaaaatgctgaggttacaggtgtgagccaccactccaggcccctgatttttttttttttaacacctcagtcccagtgctgctaggccccagagcagcatgccatctgccaaaaaccaggtttgaaaatgatgtcttgctgggcatggtggcttgtgcctgtagttccagctacttgggaggcagaggtaggaagattgcttgagttcaggagctctgggctgtagtgcactatgccaatcaggtgtctgcactaagttcagcatcaatatggtgacctcataggagtaggggaccaccaggttgcctaaggaggggtgaaccagcccaggttggaaatagagcaggtcaaaattcccatgctgatcagtagtgggattgcacctatgaatattgcactccagcctgtgcaacatagtgagacgctgtctcttaaaaaaaaaaaaaaagaaagaaagaaaagaaaaagaaaatattgtcttgctatagccacttaggtatcagaaagtgtataggacccagtacaagctccctccctggagcagttctgttggagagtctcctggcagctccctatgttaagtttcagggcctgggagggtagagggtctctttcctggctaagattgcatggttccatggttggggatgtgggccgctggaattctcttacttacccttgccttgtgttgggaagccactcccagctcccagcctatcctagccaagcaggctacttgtcttccttctcctacccacttttggtgtttcctgttagttctctgttgaattccagtgttttaccttggacagtgtatttgaagtgtgattctctatgcactattttggttcttctaagtggaagaggtgagcatgaaatggtgtttgaccaaagtctatatccctttcattcacaaatgataacgtatatatgctctttggcaaactgcttttttttttcttttgcttaacaatatttcctggaaattagttcatttgatagaattttgcactatttctatagtgcaaaattctgactcatctttgattttgttgaaccaagatacaaatgtaattttctgatgattctaaatttagaccaaaatttctgacttagttacttttgtgtagaactgctgactcagttgtagttgaatttgaaaggtaagaatagggctgggcgtggtggctcactcctgtaatcctggcactttgggaggctaagactggtgcatcacttgaggccaggagtttgagaccagcctggccaacatggggaaacctcgtctctactaaaaataaacaaaaaaaatccaggcgtggtggcatgtgcctgtaatcccagctacttgggaggccgaggcgggagaattacctgaacccaagaggcagaggtttcagtgagctgaaatcataccactgcactccagcctgggtgacggagtgagactctgtctcttaaaaaaaaaaaaaagaaaggtaagagtgttgttgttgttgttgttgttttttacatatttgtccttgagtattttaattaccagaagcagggaataagtaatagcctttcttttcttgcttatgcagcaggaggcagcagaggaataattttcataattatttgaatgtgtatttgtggatgaatgagtgagcaagagagagattctttttatttgctaaaatgatcacttttcaaattctttattgtactctatgtgaaaccacatttgatgatcacctgacatttggaaaattcctcacttctctctttcaaatctatttaagcagtcattcagtgtgatgtaacagagattgcttaaaaaaatcttgactttgcatatcatacttttaagggtgttccattctattataatatattactattgctttcagggatgtttaaaataacaatgtcagtgatgaagaaaattttgaattaagaataaaaggattacatatcagtcttcatcagaggacctggttttaaacaatgtaaagcatttttaatttttactttttgtgagatatagattcttcgtgaattccagaggttctaaaaaactcataatgtggtgcagttctaatactctacccttgtcattttgttttttaaaaatgttaaacatacaaatctggctaatgacattttttgctaaatataggaagtagaggaccagtggagaatttaatcctggtttattgcgtagcatgtgaaataatcatgcatatcaaagtagtgattcattttgaaaattggcagtttgctttatttatgtcagtcacaaataaggatatgtctttttcattcctaatggtaaaagtttaagctctctgaagtggacagctaatatacttgtcatagttgatttatgcgtaatttgtaatgcttttccactgacacaattgaaaatataaatatggcaaaatcttttgtctactttttatgttttcttttataatctttgtggaggagttaacaggataaaacatctaatttgttagcatgtcagatatttaagttaggaagtcatgtgtaagtcctttgattacgtttttaaaatttatttgtggaaaggccaccagaccccaatcctaccatttcagagtttatggattcttaaagaccattcttcttgtaatgaaaaccgtagttgagcatgaaactgcctgagtggcaccagtagattataaaaaggggtagaagtgtctcggcaaagcttttagctgtttgtctgaaatacactcatgcaaacattcccacccatcaccatcactgttcacggaaaataagctctatcctgatagcctgtagagttaaacagattaatagaaatgacgttctgcttctctctctctctttttctcagttgattcgatgtcatcagtcccgtggtggagcctgtggagacaacattcagtcttatactgccacagtcattagtgctgctaaagtgagtacctccgaaatcttggagagttgtggttatgtgtagtaattgttcagatttctctcctgaattatattttctattgtaatgattgtagtgcttgtacttatccaattttaaagattttaagtctgttaactagcttcaagactgttacctaattaataccacatttggaagaagctttccatgttttaaacagtgacttctggattctctgtgatttgcatcgttctgcctacactgacatccctttgcatctttgaacatttcagagtcttcttctcatgaaaagaatattattccctatgaaaacttgagtcagtccctcgtcacattcaaagattcttttatatcaaggggctgccccttcatgtttgtcaagtgagctctttttttcatgtgtgtgagggttaattttgatgatgtctggtaaactttatgctgattataaggtattcttgtaaccactatcctttagaattgtgaagtatacaacaaaacaattctaataataggaatgacagagtgaatctaaaagacaacatataatagaaagcacaaccattcagaaaagaacaacagtttaaagcaaaccacagagtgggaatcaaaggtcacactgttttatgtaaaacaaatacaaaaatacttcatatttgatcacagacgcttacatgatgcgcttcagaatgtgttccttggtttgatgagagaagcattacatatttttcacccaaaagggaattaaccattaggtctttatgcctatagcactatgagtttttagatttcagaaatcttttttcttttcttaagacagggtctcgctctgttgctcaggcaggagtgaacacccacctcagccttccaagtagctgggactacgggcgcatgccgccacgcctggtttgtagagacagggttttgccatgttacgcaggctggtcttgaacttctgagcttaagcaatccacccacctcagcctcccaaagtgctggggttacaggtgtgcatcaccgcacccagcaattgcagaaatcttaataaagattgcttacttttctccattgtgtatagaaaaattatgatggttatttcaatgaagagctgagagagagtatttagaaaacatcttcagtattagtctactcatttatccacaaaatacaacgagatctttttctcaagtattagactccttttagacttgtctatctcatacacatgggtcacgatagtttagcttatgatcattttcagtaatttttagttatggaatggaggataacttttcagctcctgtttgctattcttatgtgtttatgtgcttatataaaaagaaagtgatcttcattccatgttttgctgtggacatgctggagtgaggctggacttaagatgttttaaaaataagtgcagggctgggcgctgtggctcatgcctgtaatcccagcactttgggaggctgaggtgggcggatcatgaggtcaggagttcaagatcagcctggccaacatagtgaaaccccgtctctactaaaaatacaaatattagctgggcatggtggcgggtgcctgtagtcccagctactcaggaggctgaggcaggagaattgcttgaacccaggaggcggaggtttcagtgagctgagatcacgccactgtactccagcctgggcgacacagcgagactctgtctcaaaacaaacaaacaaacaaacaaacaaaacaacaaaaaaaatgcaaactccccattttctcatacctcaatattgggaactgtgaggcatatactcatgtcttccacatttaagactatgaaattatgtttaatataacactttagggctggatgctgtgcctcgtgcctgtaataccagcattctgggaggctgaggtgggaggatcacatgagctcaggaatttgagaccagctgaggcaatatagtgagaccctgtctctacaaaaaaatttaaaaattatctgagtgtgatggtacatgcctgttgtcccagctactccagaggctaaggtgggaagattgcttgagcattggaggccgaggctacagtgagccatgattgcgtcactgcaatctgtttacttttctttttgggagaatataagggttatttttaaaaaactcacaaagatgtctccagacctagaaaacttctctagagaattctttttaatatttaagaataaacaatggcaatattacaaagactcttccagtgaataagcaaagtcagattatgcctaatctggtttgatgaagccagatcaccttaatactaaaactttagaagagcattataatacaagaacactacagtccaaatcaatgaacatagatgtgaaaaatcctaaataaaatatttgcagaaaaacagcattatataggataccatatatattgtgtcacagtccatttggaataagaatatatggacataattatagtataatatataggacacaatatatgctgtgtcacaatccacttgggataagaatatataggacacaattcttcagtatataggacgctatatattgtgtcacaatccatttgagataatccacaatataagctggtttatcactcaagatcaatgagcataatttgcacatttaacaggagaaaattatatgcttatcacaatagatgaacaaaaagtatttgataaaattgaaaatatattcattgataaaatcttaataaatacagatagtttctggttctcttggtttttaaatttttctcaaattatcaaacttgtttaaacacagtaaacctggtcatactgaagtctgtttctgataactctaatgtctggttcccttttgggtccatttctcttgtgtgttgtttctgctcgttctcatttattatgacttgagtccttgtgaagcggtgtcatttgtctggggtaatacccgaagtttgttgtctcatgccaaggaaattgaagacgcggacacacaaggaatgggtttaagagtggaagtttcatagatgaagaaagaagagagcttcctcctgcagagagagggggcctgagcgggtttcaggattggggcgagatgtgattggttttatagatgagcttgaggaggtcatgtttgatttacatagggtgtagtgggttggttggaccaggtgtgtcatttgcatagcatgtgtagaggctggctatcccaccataatcttttattatgcaaatggagtctctacctggctggtgccatgttgcctgcacatgtggttacaaagaaaaggtaagagggaacctctcggttgaatatacctgacttccagatatcccttttctattggcacagctgctggcattcacctatgcaagcttccagcttgcttatctatgcttgcagcttgatctttcaggctgctttttgttagaaaagaaattatttgggggctgatttttatttaaaggaaaaccttgctgaggactctcttactctcactaactgcctaaataatttctttttaactcctgttatcacttgtttgccagaatttatttcaaaactttttagaaaatagttttgagtttgggatgacagtggagttctgggacagtatcagtcttgaataataatccaatttcagggattgagattatttgagtgaagttcacctgcaatagctgtggtcaccttattgctgtaggtggactcttctattgtatatttctttatgttcaaacccaagcttggagggaatgtcaccaagtagacccatttggcagggctttgactctcatagatgattttctagttccatctatcaaaaacaccacttagtttcttagcaccctacctcctgcttcctagaatcaccagatacctctaggcctaaatgcctagctgaaatgtctggatttccttattctttcggattctgactttgtaactcagtaccttcaagcagcattttacaaaaatattctcttcgattttcctagttgttctcattagtggaaatcagattgatctgatttccccaacctgtcattattgaaaatagaaaacatattttcttatttattttttaaccatttctaggtgatatattttttgagatacaacatggagagcacgttaaaaagccatgtagtatgtgctccttaagaaaaatacttaagtaattttacagttactttattaagtcactttctctgaaagtgtaatcattactcttttactctttccgatgacagcttcccttgtggcttaatagaggttattaaccactttgttatatagaaggatgaattattaatttttttgtcttaaattttttgtctcactgcaattgtgaggataaatatattcattgcatatgtacttggagctccttagaggaaataatcttttttacattttctgcatttccaaatacaacttgcataatatttatgctattaatgttttttcctttgattttccaagtaatttgacttttctcataaagaatatgagagtcatgaattttttatggtagtgataaaaaatattgaaattgttcaaatgagattatttgacacatttataaaatcttggtccatattttctagttccctcattaccgtcttattttcatgtgtgttaccagtgtggtcaattgatttaataaaaatgcccctgttttctcttgttatctgataacttcctaatgacaactaacagcttttgtgagagcagcaccattagcactaatggatagggaggccaactgatatggcatgggaaaggttaaagatgactagtgacccttcggcaaatctgcttgcagcagaacagaataagtaccatgctcatttgaattataggtcataacggattttctcacactttcgttatagtctgtcatgttcagctgtcttacagctacagtttagttctgtgagtacttgtgtgaagattcatcagtgatttaatgaacatttttatgtagatacctcagattgtgaggacacttagtctaatttttcatctccttttggccaggttatacttctctattcctaatttttgctgaggctttataatttttcatatatatttgagaaaatagtcagatatatacatactctgtctactaaaattaattggagagacaaattactgtgaggtgatttagatttccgttaaataacattatcagttaacttctggacactagtgctcatagatgtgcttgatgctaacatggaaacaaatttaccctaaaagcaagggtctttacaaatgcagaaaacttccagcacttttctctaacacccctgactccctgcatagttaatgggttatgataaatagtagtatcttgtaacttgctatacaaattgcatatttgatgacttaaattttgagtttagatttttgtccactactaagacaactccatcaatagtcatgttttttttttccctaggaaatatcaaacactcttcatgtaatatgagctgttgactatgaaatctactgctgtcttctctctgtggatctttttcctggttctcttatgttaacttttactgttgtggtttgctttggtacacattactttccactttttatgtgctccagttcttttagttttattccttttcattggtataagagcatgaaataataggctcaggggcaaatggggaggatatacaaccaaagactttaaaactaaaaggcattcctttgataaagggatagctgtgtttaagtgggagcatctccattagcattaatggagtgagtacatcagttaaggcatctcagaggttaatcaggcttcctggcctgctcttgacatcaatacactgtggcgcctgaatctgttggtccttcagaggcttacttgacaacactccaacagactttgtgtaagtcatttcttgtgaattattgaaagaaatgtttggctgctaattgaggaacgttgatgtgttttataatcgcgggagtttgagtttttagcactaaacaaaacagttacaattgatttgtggctttctcttggttttagtctgctgttaaattatatctttttatttgaattcagcatatggctttgctggtcatttttatttaagtatttattagtatattattatggattttaatttttcctgttttccacctttcagacatctgtgttttgtattcattaactgtgagatcacaagtagtaacagaaatagattacaaggcagtacaggatagtgtaaaaatcaggccctggagacagatggtcccagttttgaattctgactttgtcattgggtaactgtttgagcttccattttacttaacttccctagcctcgattttctctttcataaaattgaagtatctgaggaaatctatcaacatagtttatgttaagtgcctttaccagtccctagtccatagaaaagccaccgtggaaacatagctaccataaaataatgcatctattattagtgctagttttatggtattttaatagaacacttctttggaaaatacttctcccattttcagttttaatctaattattgcttacatcacatttagacctctatacacaactgtctttgtgtactatttatgaattaaaatttgaaataccatgtatataatagtttatattttcaaatttagccatagcatgtgccagaattaggtaaggatttttttttcataattgttttagaaaagatagtcacctcattgaagattaatttgaaatattttaatgaaactttttttcttacaacatgagaattggaaaaatgtacctatattatttaaaatgtaatttttgatgtgtctaagtattctagggtgcctgtttttgttctaatgatgatacccttcttcagcaatgtgtgactcacaagtatttgtctttattttagctttcttcctttcatttctttttctgtagactcagaaacttgaagctttcttcctttcagatgaaaaaacttgttatttagaaaaatgtttctattaatgcatatgaagataatcagaggatattcacatagaagaaaaaatatttcacgagttagttttacttatatgttttgaatgaaatggagctaaaatgtaattataaacatcttaagttatctttaattgaaataatatagtaggagcaccacatttaattgttttctgttaccagatagaaaataactctcttaactaatttagtatgatacttcattcatccagtgattaatatcttggacagagattgtgttttccatatgccaaatcttggtatacagtattatataacagcatattcatagatttgctttggaagcacattcttttccacataggtattctaccagtgtctcagtctttttcatactagaaataggtatacaattagagttataatatttcaaagaattgaccatttcatagtttctacttcttcctatgtcattgattttaagatgtatacattaagaggagggaatgaaagaaatatcttctataaaaatataattgtacccttatgtaaaacagagctctttaatttttttaactatggctttatgcctgccatggtgactttagagactttactgatgccattccctcaaactaatactgatattctaattaaaattcaagatcattaaaagtcagactgaatgtctgtgacagtttactgctataaaagattgtaagagaataaataacataatgattaggaaaattaataaaatgcgtatttctatgtagaatccaaatactgatgtgaagtcatacattttacctttcattgtacagacattgaaaagtggcctgacaatggtagggaaagtggtgactcagctgacaggcacactgccttcaggtgtgacagaagatgatgttgccatccacagtaattcacggcggagtcctttggtcccaggcatcatcacagttattgacaccgaaaccgttggagagggccaggtaagaagaacttttggtgcgtaccatgtgtgttacttgcaaagatggggctaagatcaagattagtcaaaatgtatttggcctaggagattatcaatttggaattttaggaattcagattatttcaaatgaggtttttctttaaaaatgattagtaacatgttagaacctgctgttttgaacattattaatgcatcaaacctgaaggtaaagtcgaggttctaagagattctcttatctgtgaggacatttgtttcataaataaataattatataacatttaatactgttctgttcataatattcttttttttcttaacttgctaccctagagactcagttattgtttcttttttgtgtgtaatgacatttgtcataacctaaattgtaagattaataaatttttttctttttttctttctttttttttttttttttgagatggagcatcactctgttgcccaggttggagtgcagtggagtgatctcagctcactgcaatctctgcctcctggattcagcggattctcctgcctcagcctcccgagtagctgggattataggcatgtgccaccacacccagctaatttttgtatttttattatttatttattgagacagagtcttgctctgtcgcccaagctagagtgcagtggcacgatcttggctcactgaaacctccacctcctgggttcaagcaattctcctgcctcagccttccaggtagctgggatgtaggtgcgtgcctccatgcccagctgacttttgtattttttagtagagttgagtttctccgtgttggccaggctggtctcggactcctgacctcaagtgatctgtccgccttggcctcccaaagtgctgggattacaggcatgagccaccgcgcccagccttaatttttgtatttttggtagagacgcggtttcgccgtgttggcctggctggtcttgaacccctggcctcaggtgatatgcccgtctcggcctcccaaaatgctaggattacaggcatgagccactgcgcccagccacgtaaattttgttttaaaggcaggaccatacctatttggaggaatttataaacaaattaattaatagttgcaacttacacaatttactgagtagtatcaaaatttataacagatgttttcttatcaatataaaaatatgtgaaatcttaaagtagcatataagaatacatacatggcagtagcttattataaaatcttgtatcttcagatacagtgttctgtaattttaaaaatctagcttcagaaacatttacaatgagtgattataagtacagaaatacatgttacatttgcttataaatcttgctggtaaggtatcatttgggctgtttttcccccatgcactcataaactctattttcttttgtgtcatagtcttcattttaaatatacgtttcttaaaggaaggtaatttttttattctgatagtgtgtgatcattgatataaaaatacaatctagaatcaattcctagaatgagataggagtagggcagtattggtgaaataaaatttcttttagtttttatatagaatatatatttaattccatattcagagcactatgcttagaaactatgtgagctgttaaggtattagccttaaatattgcatatgttttgagaaaatctgtttccagtatatatgggttggtgttgtgatgaaaaattacatttggcagctacttatatgctagttcctatagtaagattaacagcgtttcaagaaagtttttctgcaattacaacaaaaaaactttgaaattctggattattaaatttggctcttgtattttacttgaaatctgagtaataattctctgcctctcctgtcttaactttgtggttagccaaatgtgttacagattcgtatttttttaatgaagtgctagaagacttttcagttgactttaatgactttgtgttaattagttgatgtggataaacacaaatgttctcttttttaattgaaatgaaatgtataaacttttagtgttgtgagtgttagagtaaaatattccttttgttctttgattttttgatttttaattaattcacctacaaggccacccacatttattgggtagtaacaactctcctcaacattgtctaggaccatacatctgttaaagatctagcatttgttgatggagagatttgggattatttcaaaatagaaaatgttatctcagtaattttgatgaaatagaagtgtaattcacgtatttattttgttaaatggaagtatggggacatataattatattaaaacatgacatttaggccttatgttttaaaatgtggtttaatttttttctttaagttcattaactttttatgaccttgaaaaaggaagtcttaattttggagtatggaaatggactatagattggagagttgcaaaagttcatttgtctgtgataaatgcattgataacacttgaaacaaatatgtttattaagaagaatcatagaaatgttaacttttaaaagttaagaatcttaaatgttgttcaacatggaacattctaccttttctgttactggttagtagccccaatcttccacttatgacatattctgaaattttaacttgattaaaaaattctgttagaggacaggaaagaaattgattttcaataaaaggtgagttagtgtgtacattttaaaaaatatatataatttgtaaagcaacaagatctgtgcagtataattctgtcttttaattaacatgaatctgttttttgtcaataaaatgtttttgtctctgataagtagttcagttggagtacaggctgtttttagattatgctggattgtattaaaactgcagtggttaatgtcttagatttatcgcttttagccccttccgctgatgtttagcctaaactgtaatgtttttccttttccaaatacaactcagattgtatacgaaaagctgataatacattgacttttgctgtttaaatcccttgagcctttgataatgattttttttgtgttaacaattgtagtatataaaatcggattcaccatccttctgatgccatattgattagtttgattttatggtgatgggatcattgtgtgttaactgtattaagaagaaatggatttgattgactttgcatccatttttatctgtgttactttcatgttttatttaaaagcatttctggaccagaataagttaagtggtataatttgctttttacacgtttatataattgaagttagcaatgtggcaaaatctctaatggaaataaaatgcttcagaatgatgacataaatctgagctatttcttgcctggagaacaagtgttattcataataatttaatagcttctgaggtgttttgttcatgtgatgaaggcttatccaccttgtatcaattcatgggctctgctttgtttaatgtagtcaggttgttaatacagacttaagagttcatcctactgtgataagtggtgagtgaagattacatgtcttaggaaaattatactggaatatctctgacattaatggtttaatgttttaggctaggtgatgatgcaatggagaagattcttccaaaagtatctggttgtttatatttgtgaagtccataaagagaacattcaaagaatcttacgtagtggtaagattaatgtgcctttttgctggatggcttctgtctttattattgccatcaaattgaatactcaatgccagttgtattggaaggaaacatacagggtgtagggttataatatatgaaaggaaagggaatcttgtagataaagtttaaagtagaaaaatgggcaaaagatagaaataaatatttcacagagaaaataaaatatggttgaccattgaacaacatgggtttgaactgcacaggtctacttatatgtggattttctctgtcactaccagcccttagacagcaagaccaaccccttttcttcctccctgtcctcctcctccttagcctacctgtagtgaagacaatgaaactgaagacctttataattgattcacttccacttaatgaacagtaaatatattttctcttactttattataagaatataatctgtaatacataacatacgaaatatgtgttaattgacaatttttgtcatcagttaggcttccagtcaatagtaggctattagtagttaagtattggaggagggaaagtcatatgcagattttcagctgtgcagggggtcagcacttgtaaacatgagttgttcagaggtcaactatacatgtaaatgatataaaatatacccataacttcacttgttattaatgagaaagctgcaaattaaaactgagataccatgttttacttatcagaaactgagccgctcaaaagcttgcaatatattctatatttttattaattttgaagtaattatagactcacagtgagttgcacatgcctttcatcttacttcctccagcttaacctgaatgatgatgtattttgtagctatagtatagtaccaaaacaagaaaattttctgagtgatgtgggttaacaaaaaaaacctcagaaaatggacaatgatacactctgttaactaggctacaggtcttaatcagttttctctatttgtttaacctgcattcattggtgtgtttatgtgggcatgtatagggctgtgaaattttatcccatgtatacattcatgtaacccccaccacagttaagatacaggactgttctaaactgtttcatcaacgcatacttctttgtatttcatgagcatccctcatcccaccccatccctttttcctgataaccactaatctgttttccatctctatagttttatgactctgacaacgttatgcaaattgaataatacattatgtaatattttaagatggactttttacactaaatatattgtctttgaagtccattcaggttgcagcatgtagttcgtactttttttcttttctttttttttttttgagacagagtctcactctgtcgcccaggctggagtgcagtggcgcgatcttggctcactgcaagctctgcctcctgggttcatgccattctcctgtctcagcctcctgagtagctgggactacaggtgcccgccaccacacctagctaattttatgtattttttagtagagacggggtttcgccatgttagccaggatggtctcaatctcctgacctcgtgatctgcccacctcagcctcccaaagggctggaattacaggtgtgagccaccgcgcccagctgtagtttgtacttttcaatcactctgttgtattccattgtatgaatgtgtcagtttgttcaattattcaccccttgaaggacatttgcactgtttctagcatttttctattatgaataaagctgtcgtgatcatttgtgtaaaggtttttaatgtggatatgttttcatttctctgtaaatgcccaagagtattgctgagttgtataagtgcacttttagaaaggaaatgtgcaactattttccaaagtgcctgtgctattttatattcccaccagcactgtatgatagacagcagatttcccaactgaatccatggaagctgaagaaagtggtacaatatctttaaagtactgaaataaatgaactggtagccccaaattccatttgtagtgaaaatatacttcagaaatgaaagggaaataaaggcattcttagaaaaaggaaaactaagagaacctatcactcgcagatcaactcttaaaaatggcaaaaagttttccaaggaaatgacaataaaagaaggcttagaacttcaaaaatgaaagaacaacaatggggtgggtaaaaataaaggtatatgtgagatatcctttttaatgaatttataagattatatttgatgattgcgttagaaattgtaacatcatctgatgtgtgttgaccgatgtgtgtgtaagaaatacttaatatttttatattttaaaaaatggggacataaattgaactttataaaaatcaaaatttatgctacagtggacacaatcaagaaaatgaaaagacaactcacagaaggggagaaaatatttgtaaatcatatttttgataaggtaccagtattcacaatatgtgaagaactcttataactcaaaaataaaaagactacctaattttcaatgagcaatggatttgaataaacatttctttgaaaaagatatacctgtggctgataagcagaaattgggacccttctaacctgctagtcagaattgtgcattcactttgtaaaagagtttcaaagttcttcccaaaatgttaaacagagttatatgactaatatatatctacgataaaactctgaatatttgcagcattgtttgcaatagccaaaaagtagaaaaaaatctaaatattcatcaactgatgaatgggtggataaataaaatgtggtatatgcaaacaatataatattatttaacaatataaaatgtacattttagtggcattaagtacatttgtagtgttatataattatcagtacaggcactatccctttccaaaactttttcaccatctgaaactgaaagtctctgcccattaaacaataacttcccagtactctgtttcccaggccctggtaaccagcattctactttctgtgtttgaatttgcctgtttctaggtatatcacatagtgcaatcctacagtattcatccttttgtgtctggtttatttcacttagcataatattttcaaggttcatacctgtcgtaacatatatcagaatttcatactttttaaaggctccataatattccactgaatgtgtatactacattttgtttatccatttacttattgatggacatttggcttacttctaccttttgccaatttttttttttttattgaaatggagtcttgctctgttaccaaggctggagtgcagtggcacaatgttggcccactgcaactgctgcctcttgggttcaagcgattctcttgcctcagcctcccaagtagctggattacaggcatctgccaccatgtctggctaattcttgtattttttgtagagacaaggtttcgctatgttggctaggctggtctcaaactcctgacctcaagtgatctgcctgccttggtgtcccaaagtgctgggattacaagcatgagctaccgtgccccgccacctttcgccaattttgaataatgcttgtgtgaacattggtgtacacatttctaattgagtctctacttgtaatacttttggttatgtacctaaaagtcaaattgctggatcatatggtaattctatatttaattttttgaggaattaccaagctatttttcacagtggctggaccattttaaattcccaccagtgaacgtccaatgatggataagggtctcaatttctcgtatatccttaccccaacactagttatttttctttttaaaaataatggccatcctaatgatgtaaatggccatcctaatgagtgcaaagtagtatctcatcatggttttaatttgcatttacctaaggaatagtgatgttaagcctcttctcatttgcttattggccatttggttatctttaaaaaattgatacataatatttgtacaaatttttggggtacatgtgatattttgttatatgcatagaacgtctaatcatcaaatcagggtatttaggatatatatcaccatgagcacttagcatttctatgtgtagagaacattttaagtcttcactactagctgtttttaaatgtaccaggtattgttgttaactattgtcactctactatggaatgttagaacttattcctttgatctgagtgtacatttgtacccaacctgtctttcttcattctttttttctttttctttttcttttgtctgactgggttagtttgaaaggcctgtctgtcaaactgaaatctctttcttctgtttcatctagtctattgttgaagcttctcaatttttttttttttttttttgagatggagtcttgctctgtcacccacgctggagtgcagtggcgcgatcttggctcactgcaagctccgcatcccgggtttacggtattctcctgcctcagcctcctgagtagctgggactacaggcacccgccacaatgcccaactaattttgtgtattttttagtagagacggagtttcaccatgttagccaggatggtcccgatctcctgacctcgtgatccacccgcctcagcctcccaaagtgctgggattacaggcgtgagccactgcacctggactcacttgtatttttatgtcattcattgagttattcagtttatggatttctgtttggttctttcttatgagatctatctctttggtgaatttctttttcatatcctgaattgtttttcttatttctttgtaatgttgtctgtgtctgcttgtatctcactgggcttctttaatatcattatttttcaattctttttcaggcattttatacattttttgggggggttaaaacctattgttggaagattgtgtttctttggaggtgtcatatttccttgctttttcatatttcttgtgtcctttcattgatgtctgtgcatcaggtataacacttctaattttttttttcttgagacgaagtctcggtctgttgccaggttggagtggtgcagtggtgcgatctcagttcactgcaacctctgcctcccaggtttaagtgattcttctgctcagcctcccgagcatctgggactacaggtgtgtgccaccacgcccagctaatttttgtgtttttagtagagacgaggtttcaccatgttggccaggatggtctcgatctcttgagctcgtgatctacccgccttggcctcccaaagtgctgggattataggcgtgagccaccatgcccggcccacttctaatttttaaaattggctttcataggggaaggctttttcctgtgtgtttttttttttaaaataatgacaaggtatttttaaattggtaatacataggaagataataactcaaaggagtaggtagcagatgccagtatattcaatcaatgagctgtattttactggaatttaatcaatattaacctgaaatagatgataagttaatatgcatattgtaatccctccaactaccgctaagaaattactcagaaaaagtaacagaggacttaaaatattaatgctaaaaatattttctaaacacaaaagaagataggaggaacaacaaacacctaagacatataaatatacatagtaaaatggcaaacttaaaatccagttataccaacaatatattaatggcaaatgtatcagacccaaattgcttcagattcaaagaccacttgtttgaaaataaaaagatggtaaaaaatatatcacatgctttaaaaattttaatgtaagacctcaaactaaaaatcatagatgaaaacctaggaaataccctttttgacatctgctttggtaaagaatttttggctgagtccccaaaagcgattgcaaccaaaaacaaatattgacaaatgatacctgattaaactaaagagcttctgcacagcaaaataaactatcaacagagcaaacagacaactacttaatgggagaaaatgtttgcaaatggtttatctgataaaggtctaatatccagcatctgtaaggaacttaaatcaacaagaacaaataaccccattaaaaatgggcaaaggacacacatacacttcttaaaagaagacatacgtatgggccaacaaacatatggaaaaatgctcatcatctctcatcatcagggaaatgctaatcaaagccacatgagatgccaccttaacaccagtcagaatggctgttattaaaaagtcaaaaactggctgggcctggtggctcatgcctgtaatcccagcactttgggaggccgaggcaggcagatcacgaggtcgggagatcaagaccatcctggctaacacagtgaaatcccgtctctactaaaaacacaaaaaattagctgggcgtggtggcgggtgcccatagtcccagctactcgggaggctgaggcaggagaatcgcttgaacccaggaggcagaggttgcagtgaaccgagatcatgccactgcactccagcctgggcgacagagcaagactccatcgcaaacaacaacaacaacaacaacaacaacaacaacaacaacaacaacaacaacagatactggtggggctgtggagaaaagggaacacgtatacactgctggtgggcatctgaattagttcagccactgtggaaagcagtttggagacttctcaacttaaacaaagctaccacttgacccagcaatcccactaatgggtatatacccataggaaaataaatggctctaccaaaaagagacatgtatattaatcaccatgctattaacaatagcaaagacatggaatcagcctaagtgcccgccagcagtggattcaataaaggaaatgtgctattcatcaccatggaatactacacagccataaagagaatgaaatcatgtcatttacagcagcatgtgtggagctggaggccaaaaccttaagcaaatcaatggagaaatgaaaaaccaaatactccatattctcacttataagtgggagctaaacattgaccacaccacgttgggaggccgaggcgggcggatcacaaggtcaggagatcgagaccatcccggctaaaacggtgaaaccccgtctctactaaaaatacaaaaaattagccgggcgtagtggcgggcgcctgtagtcccagctacttgggaggctgaggcaggagaatggcgtgaacccgggaggcggagcttgcagtgagccgagatcccgccactgcactccagcctgggcgacagagcgagactccgtctcaaaaaaaaaaaaaaaaaaaaaaaacattgaccacacatggacataaacatgggaactattaatagacactgcagactactagagtggggagggaggaaggaggagtatgggttcctattgggtactatgctcactacctgggtgcaatatatccatgtaacaaacctgcacatgcaccccttgtatctaaaagttgaaattaaaaaaaaaacatgtaaacaataaccataatagaattagagtggccatagtaatattaaagactttacgtcaagaagtattactggagtaaaagagagacatttcattcacgataaaagggtcaatataataaaacaattgttaacacataatacagataaaacatttttttctttttttttctcagtaatacttgttctggaaaaccactattaatatgtataattaataaaacaattattagtatataaatacctaacaacacagccactaaaaacattgaacaaaatctgacaaaattgaaagaagaaattttagctcttttttttttgagacagagtcttgctctgttgcccaggctggagtgcaatggcacgatctcagctcactgcaacctccgcctcctgggttcaagcaattctcctgcctcagcctcctgagtagctgggattacaggcacgcgccaccatgtccggctaatttttgtagttttagtagagacagggtttcactatattggtcaggctggtctcgaactcctgacctcgtgatccccctgcctcggcctcccaaagtgctgggattacaggcatgagccaccgcgcctggcccaattttagctctttattacagctcaagatttacataatttattctcattaattgataggaataagcactctgtaattttccacatgcatgttagtaaacatgtacgactatttctctattaaaaaataattgatagaacaactagatagaaaattagaaaagacttagaagacatgattaacactattttctaacttgaccacccaaaactgcagaatgcacattattttcaaaaacatctgagacattcattgtacatgatagaacagatgcttggccatgaaacagatcttaataactttaaaaggattaaagtcatgcggagtatttctctaaggacaatggaaatcaataacaaaattcgatttggggaatctccaaatatttggaaataaaacgcacttgtaaataactcatgggtcaaagaaagaagcttagggacattagcaaatattttgaattgaatgaaaatgaaaacagaacatataaaaatttatggagtataactatagtgttatatggaagaaaatttacagctttaaatgcttatattaggacaagaaaatggcctgaaattaataatctaagtgtttcccttaaaagattataaaaaggagcaaattataaccaatgcaagactaatgaagcaaataataaagatctggatagaagctgatggaacagtaaacagtgaaatattggaaaagtctaaaattggttatttgaaaagatcaatataatcaatgtatttgtagctagattgaattggaggttctagctagatcaataaggcataaagatctgacaggataatgtttcagacatttttatgatggcttgttgtttatgatattgtatagcatgattgacctgcacagttaaaacgggtagcttttgtggtgtgcaagttgtatctttgtaaagctttcactcacaaatactatctcagtgcttaagtacattgtttttttgggctgtatttgcatatatgttgtaactgataaaataactgttctggtcatttgctctgtatctttcagggcaggaataacatttggtttatattctgagctctaagcagagtattttacacatagtaagacttgactcttaacatgcatttttgagagaaaaaaatagcgttgccagtgtaggacaacttccaaggctacttaaaatcaaatttctctgtgtctaaatattatgatccaaaattggtgtaataggttttctttctgaaacattagataagtaaaacaatttttaaaaagttgttgaacttatgatgggaaattatatggaatgtaaattatatttcagtgtagccttaaaaattaagaggagtgaataaaagaaactccatttgagatacagaggtacctattctaatgtacctctgcttttatgatttcatagtcatttcaaagaagttctatttctctctagaaactgagagttgaagaacacgactttcatactataatatgaaaatgttattggatgatttctctatacacctgtttatttatgtttaacaaattatgttgtttcccccccattcttatatttcaataaggggcaaaaaattgtgatttcccagcagatcgcataacacagtaagacctgtatttcctgtccttggataaagcgctaagtgattacattttgtaaagaattgaaaatagttgattgtatcattttttttcctctgaacctatacttgaagaagtaattgtttctgtcatctacagtcaagtcagctgactctttttagagtttatatgactgatgtgcgtgggggcatgttatatctcttcctcaattctaaagtggaattctctccttatattggcaagaataatctgctagagtggaaacatgttatttggtcagtggtttgtgatgtgccttcttataggcttcaagctcggttatcagtgagaaaatatttacctccatttgtctttatttctttgtgaaggtgcttgtgagtgaggattctgacagtgatggcattgtggcccacttccctgcccatgagaagccagtgtgctgcatggcttttaatacaagtggtaagttcgctctctgtcttttttttttttttttttgtagaccatttatataatgggttttccagccaaatatggaatatggaatctgacttttcttcatgtatcagtatatatcagaaaagttattaagtcattatattgaataaaggaatttataataaaaatttagtacccctctaaaatccctctaaaattggttttgttctcgataaagtagctattaaatagcagccatttaaacaatgctgttgagttacatgaatttctgtttataattactccaagaacttcagtattccaaactagaatattaatggatatgagcagtattttttttttgtaacttgaagttttgtgtaactaacttacaacactttgtaagctaatttaattttctcggttttttttttagtggtgctctttttctttttcttcttaaggtttactccttacattttgttatatctttttagttccttttaatatagcatacaatttgtactcttaattttcttttcacaatatccagagtagttgtcttatttaaattctgcatttgtaagatttttaaatttttattttactatttttttaaaaaaagataaagacagagtctcactatgctgcccaggctggtcctgaactcctggcctcaagtaattctcctgccttagcctcccaaagtattgccacgatgcttggccagatttttttcattatgataatgtttttgtatttctccattccctggatatctatctgtttaactggaagttaagtctagaggtataaatccattcaggctaaggagtttttgtttgtttgtttctaaacttcgtaagtattgcgtctacatcatttcatcccaataggagacacattattttaggttgtctccctatttgtggtgctatatttgatcacatgagtaaagtaatgactatcaagtatctacattattggaaataggtttttcttatggagattaacaagtactctacagtatgtcattttgacattatttctgaagcaactttttaattaataattttgttacattgaaggttgtagaatggtgggttgttttcttaattctgtcctggtctctgcatttattgactgttattcttctatagaaaacgttttctctcatcagccaggagtaaacagcctttctcctgtatatcaaaagtggtataaatgcctaattctctctctctctttttcttttaaatgaccaattttcacagtaaggagttggtgtaatacttccagtggtaggaaacaagttacaggttgagtactttatgtctgaaatgcttgggactagaagtctttctgattttagattttttttttttgattttggaatatttgcatatataatgagttatcttggcggtgggacccaagtctaaatacaaaatttatttgtttcatgtataccctatacacatagcctgaaggtgattttgtacaatattttaagtgattttgtgcatgaaacatagttttgactccgttttaactgagactttgtacatgaggtcaggtgtggattctccagttgtggcatcatgtcagtgctccagttctggagcatttcagagcattttggtttgcattataagaagaacataaatttctgtgaggattttggtttttcagattaggaatgctcaatctgtattttaaaaatactttgtaaataaaactgctcttttgttttcagagctggtatagtcatcataaacttgcagtcttttcagatcttacccatttggttgatgtatctaaggagcatgctacttttaatcttagttttcagaaatgattatatcacttaaaattgatgggaaaagccaatccttttccccttcttttcatcttttcaaataaagaatgatagtaagggattatcattatatagagatattattttataaagcactttaaataatctaccctctaatatcttaataagtcatctttgattaagggaacaggatttttatagtgattggtaatcagtaggattgatttaattaataaaggcaagatttattgaaattctgtgagtgttgtgggaattaagttaaatgtgaaaaaacagcctggaagttatgtcacttgtagcactccacttggaatgaccggtatgactcatattgatattccatctgttatgtcagatctcctttgtgttagtgtatatttcatataaccctacagtgcttctgacactggcagctgtatttttttcctgtgactttgcattataagaagaacatattatataatataaagagtgttgtagtcgtcataaaatggtttcataattttgatctacatttgccatttgatttctttgtcctctcacatttgtgtttatacgataaggttaaaaatagcaatatttatacctatttttctgtgttgctgggacactaggtttataactatgatgtaatttattttgtgacaatcatttgtttaaatatttgtttcccttgctaacttatctgttcctcctacaaagagatcagatgtcattaatctttgtatctctagtgcttggcatggtgtctcagagtaataggaaacttagtgaattattttgaactattccccactgtagatgtatggcactgtattaggcatggtagtctctattttgacaatgaaagtgataggtcagttcagtatttttaaattcttttatttatttttttctttctttctttctttttttgttttttgtttgttttttttttgagacagggtctcgctcttttgccaggctggagtgcagtggcacgatctcagctcactgcaacctccgcctcccaggttcaagcgatccttgtgcctcagcctgccaagtagctgggactacaggcgtgtaccacgcccagctaatttttttttgtatttttagtagagacggggtttcaccatgttggctagtgtggtctcgatctgttgacctcgtgatccacttgcctcggtctcccaaagtgctgggattacaggcatgagccaccacccctggtcctttccttatttttctatagaaattttgatgagattctactaaagttcttctggaatttattcactttgaaatggttcatggtgtatagagtttccttgttctggtattacataattgtttcatatagcaatctatgaagcctgttaatatcattggaaataatcctatatggagatgctaattagttaactgtacctgtaaacttgtgagtgatgaaaataatggttatttttatatcatttcacatttatatataattctctaaatattgcttatgcttcaaaattatgatagagcctataatttaatatattaacaaaaaagcccttatactacttatattttaattttttaaaatcttaagtattatattttgtgttttaatttcattctgggaaagtggttcttggcttgctaaaaggatccacactacagaaatgttttagaaccctttatcaaaaaggttgaagcttgctgatgtgattttacccgtttcagctagcacattggaagatacctctttcactagtgactctattcaccttgtctggctaagtcttgttaattcacttaataagagatagtccctatgcatagagtctgcttgctggttagttgcaaatgcacaaacagggtcttaaggaaggaaaaccctttgtggaggaaggacagcatgctaggggataaatattagcctggttttggagatagttcttcaaaaggaaatcaattccaagctgggacctaaaagattagaaaataatgattcagtgcctggcaccataaatattatttgaatgaaagaggcaagaaaaatatggtacatttgaaatagattgtgaaccatagtctgtatagtggactcattagtttgttgtgcacagatatgtttttcaatgtgttctcatttctgcaacattttataaatccttcatgcctgtttagatatctgtattcagtggagggtttataactcagcaaccactcatacagttggtttgcacaatgctttatagtagctggtaagcaattacttacaattcttcttaattatttactttcagctttgagtatttttgctgttctgaatattgacttattacttgattatgagcaaggatgcagaaagtgctcaattctcaatgatgtggaagtctggattttttccttctttttttaattagcaagtgctagtcagcagctacccagctttgtacaaaaagtaattggggttagccatggcttctaaccattaatcagcttgtatcattaggtgacattttattttgctttgctagtttctggttcatatttactcttctaacccttctgattggtgtacatacatatacacacacatacatagaggacatgttttagtgaggaaactgcattgctatttgtaaatgcatagatacctcagtagctgggttttttcccttaaattattatttgtcttacagttttaaaaatgtttttgtgagataaaatgatgtattttctagcactcttcatttaagtccttcccactagtaaatcataagtttactaatgtgattaagaaatgcgacattataaaatgaggtaggagccgggcacattgcttataatcccagtgacccaggaggctgagatggggggaccaacacttgaggccaggagtttgagaccagcctggccaacataccaagatcctgtatctaaaaaaaattttaaaaaattacctgggcgtggtggcacgtgcctgtagtcccagctacttaattgggaggctgagatggaagacttgcttgaaccaagaagttaaggctgcagtgagctctgatcccaccattgcactctagcctgggttacagagtaagagcctgtctggaaaaaaaattaaaaaattaagtaaaatgaggtagttctctgcacactggctgaattatatttgttagcttctgaacttttattaattgacgttttataaaaagatatgtaatttcttttttattttaatttttaatttgtttattttattattattatacattaagttttagggtacatgtgcacaatgtgcaggttagttacatatgtatacatgtgccatgctggtgtgctgcacccattaactcgtcatttagcattaggtatatctcctaatgctatccctcccccctccccccaccccacaacagtccccagagtgtgatgttccccttcctgtgtccatgtgttctcattgttcaattcccacctgtgagtgagaacatgcggtgtttggttttttgtccttgcaatagtttactgagaatgatgatttccaatttcatctatgtccctacaaaggacatgaactcatcattttttatggctgcatagtattccatggtgtatatgtgccacattttcttaatccagtctatcattgttggacatttgggttggttccaagtctgtgctattgtgaatagtgctgcaatagacatatgtgtgcatgtgtctttaaagatatgtaatttcaataggccttaacacagtagttacaatttttaatttaaattggctttttccaaaatataactaatagatcctccaatgacatactccagtccttctttacccatacatgtaaccatatatgttttaaaatttatattaggaagttttaaccctctaataattatctaatttggttaaaggtattttcatggggtatgtaatatggctaataaaaacagtattgcttgttagaatactttttactagtttagggaagtttatgtaaaacaaacaaaacatgccaaaaagttgattgcatgatttttgtttttaaagctgatcttactcaaaccagtttacctgtgtttgtcactgttacacttaagaatataaataaattccttttagtcttcattcattcattcattttttgagacggagtcttgctctgttgcccaggctggagtgcagtagtgtgatctcggctcaccacaatctccgcctccaggttcaagcaattctcctgccccagccttctgagtagctgggattacaggtgtgcgccactgcacccagctaatttttgtatttttttagtagagacggggttttgccatgttggctaggctggtcttgaactcctgacctcaggtaatccgcctgcctcagcctcccaaagtgttgggattacagacgtgagccactgcgtccagcccttttagtctttttaaaagaaagacatatttttagacaacagtattataaacatgtcctggacaacaaaatccaagaacaaaccaggcccatagccacttcctgggaaacgttaaaaatactataaaatgtacatgatggaataacactgcaaaacgaatttaggagaccatgtaggttggttgactgggtggcatacatttctgtcttgtatgggacctattcagaaaagacatgaagtgatgctattaaatagatctgtgaaacttctagttcagcagctgcattcatttttttttcaattttttaattcccattcttatttattagctgtgactttgaggccagaattaaaacaaatattttagtggcagcatttatgatttgtttagaagtaccagattgatccccatggttagatctgggcagattcaatatgggcagtgtaaatttgttgctctcagggacaaagtgaataacattttcaaggaactttaaaaaaaattaataaactttattttttatttttatttttttgagatggaacctcgctctgttgcctaggctggagtgcagtggcacaatttcagctcactgcaacctccacctcccgggttcaagcgattttcctgcctcaggctcctgagtagctgagattacaggcacgtgccaccacaccttgctaattttttgtatttttagtagcgatggcatttcaccatgttgcacgggctggtctcaaactcctgagctcaggcaatctgcccaccttggcttcccaaagtactaggattacaggtgtgagctaccacacccggccggaatcttcttttgcctggctaactcttacactgattcctatcttaaatatcatttaagaagtcttccctgagtctacataaaatgtcatgttccccttcctccttcaccttgtcacctaattgggcaagctagttaatctgcttgtcacactcaatgcttcagtttcctcatcaataaaatgggggctagtaatgatatctaaaataatacctggccaggtgcactggctcacacctttaatctcaatactttgggaggccaaggcaggtggatagcttgagctcaggagctagagaccagcctaggcaacatggtgaaactctgtctctacaaaaaatacaaaaattagctgggtgtagtggtgcactcctgtaggtctagctacttgggaggctgaggcagggggattgcttaagcctgggaggcagaaattgcagtgagctgagatcgcgccactgtgctccagcctgggtgacagagcaagaccctgtctaaaaaaaaataaaaaataaaataatatctaacaaatagagtaacctcaatagatattagttgtttctgttttcattattatcaatcaccttcatcctagtttttaaattatttacatccatcagagtatcttttcaatgtgttcgctgttagaggtaagcttttgttaatattttgtccccaagtattagcccagtagctttcacatacttgatactgagtaagtgtacattgaataattacaataattaattacattggattgcttcataattgtaatcatggaaaaaatatagcagggcaaaattaagacatttattcaatgttgttattcatttgttgaataaaatcaacttatgtctaaattgtggtttgaataagaattgtctggccgggcacggtggctcacgcctgtaatcccagcactttgggaggccgaggcgggtggatcacaaggtcaggagatcgagaccatcctggctaacatggtgaaaccccgtctctactaaaaaatacaaaaaattagccaggcgtggtggcgggcacctgtagtctcagctgcttgggagactgaggcagaagaatggcatgaacttgggaggcggagcttgcagtgagccaagatggtgccactgcactccagcctgggcgacagagcgagactcttgtctcaaaaaaaaaaaaaaaaaaaaaaaaagaatcgtctccatctctatatattgggagtgatacatgatggcaaattataatacatgcagatacatatcacagataactaaaactgaaatatgtaatagatagtaatttaaaataccccatggaggctggaagcggtggctcatcccagtaatcccaacactttgggaggccgaggagggcggattacttgaggttgggagttcgagaccagcctggccaacatggcgaaacctcatctctactaaaaatacaaaaattagctgggtgtagtggcacacgcctgtaatcccagctactggggaggctgaggcaggagactcgcttgagccaggaggcagaggttgctgagatggtgccactgtactccagcttgagtgacagagtgagactccgtctcaaaaagaaaaaaaaaaggaccccatggaaatgacatttttatgtaataagaacaatagattagtatactattatgtttttggacaacaaactatttcttatttatcaaactatcgttagaaacataaggaagaaatcctcaattctgtgcaataagcctgacatgaacctttaattcagtaaataattgatttgcttttcagaggcattacttctgccagctgagcaactgagaaatgtaaagtacaacacatctacattttaaataattacccctccttggcagggaaattgcttttccatccattaataagaggaaaatgagtgttgaatctctagcaaaacagagtaaatatgtacccctttagatgcttggctgcatctttagcagacttgaaattcttctggttacttaaatgatacatattaaaaggtgattgtggtcttgggttaattgttaaagaagtttaggtttttctttttggacataaaggttttcccattgtctagcaagtggttagagaaataccatgtcttgatttatttttaacatctataatgcatcacagatctacagcataacatagcttgagatttttaatctgacagcttctggtttatcactaccagacacctatattatttcattcacaatgcaaaggcaacttgaagaatttatttccttttttcattagaagaggatgtttccatagtaggtttgtacttactctcttgtttcatcatcttgtaaagtggtgtcctttactcatgtaatggatttactctctgaagaattagttctgtttgctctctgttcattgtggcactgtagttgtgtaagagagggatctttgtaggggtgacttacgattaggtagtaggtacagtgtctagggaccacaatacttttagaacctcgctataattttctgatttctttaaaagcagaaaaaaaaacatggttttaagttaatagaatggagtaaaaaaatataactttaagtattttttcctgaaggagagtgcccatgaagacaaaaatgcccaggtcccacctaaagtcctaatgtagccctgggttccatcagtaagtgaagagccttttccattcttcatcactattgccacagcactaccacttaattgaataaaggtgctcagttgatagtgaatgaactcatggaatatgtgaatgcatacattgggatactatgtaaaaatgtgaaatcaacatatatacctgtaaaaatagacctgtctacaacaaatataacataaatacttacaataatataaacatagtatttaattttgcaaaaggtaaagaaggatctgtatagtcaggtacatacatgcaaagcagctgttgatttcaacttttcatttatcagtatacccttactagttgttaaacactgaagtacttgaatacttcttgcctgtcccagtagcctctgagcctccctccctggtgggggatggtgggcaccttgtttcactattcttattcagattggcctgtatcttgccatacattaaatattttttgaacattgctctaaaaacagcctaaatatttcccaaagatatatattcatttcaaagagatttattatatatagtaaggtgggtacctgtggtcgggagcagtgagaaatgaagagtgggtgcaggaacggagaagcaaagagaaaatgtaaaaacagtaagaggctgggtgcagtgactcatacctgtaatcctagcactttgggaagccaaggtgggcgaatcacttgggttcaggagcttcagaccagccttccaacatggtgaaaccccatctctactaacaatacaaaaatcagccgggtgtggtggctcatgcccgtagctgtaatcccagctacttgggaggctgaggcgtgagaattgtttgaacccaggaggtagaggaatacaatgcaatgcaatgcaatgcacatagcaagagaaggtttatgtatggacttattaacatagacgaaatgaaaaatctgattaattcttccatgcatctgaagtctaaaaaggatatctagaatgctaagaaagtggaagtaatgtttatcaattagaattgagaattaataaatgtgatgttaatatagttttaagagtacaacaatgtaaaataatactatcaaatacaattatagttaattaaataatttatactataattgatatagtaattaaaaatgaactgattttataattttctctttgttcctttgattgtttctaagaagacattgaataagtaaatatataatttggttgtgcacagaatgcctgcctacccagtcatcttttttatggatcagccatttttcttatatatacttgttctgtaacatagtcacagagtcatgctttgatactgctcctgtaggtaatcaaacctaatttccagagacacttggtcatttggtaatattttcaacatatgctcatatacccaaaatgtgttaactgatgtacaatttgatacagcatgcttgatgactatctttgaaactttatctttcatctaatcattatcatttgttacttagttacttactttctgaacatttggaccagaaccctgattcatgtctgttatattttcatttaagtactatgatacatggttctttgagcacccatttagccaagctgagactcactgaccttttttttttttatactttaagttttagggtacatgtgcacaacatgcaggttatttacatatgtatacatgtgccatgttggtgtgctgcacccagtaactcgtcatttaacattaagtatatctccaaatgctatccctccccccttccccccaccccacaacaggccctggtgtgtgatgttccccttcctgtgtccatgtgttctcattgttcaattcctacctatgagtgagaacatgcagtgtttggttttttgtccttgtgatagtttgctgagaatgatggtttccagcttcatccatgtccctacaaaggacatgaactcatccttttttatggctgcatagtattccatggtgtatatgtgccacattttcttaatccagtctatcattgttggacatttgggttggttccaagtctttgctattgtgaatagtgccataataaacatacatgtgcatgtgtctttatagcagcatgatttataatcctttgggtatatacctagtaatgggattgcagggtcaaatggtatttctagttctagatccctgaggaatcgccacactgacttccacaatggttgaactagtttacagtcccaccaacagtgtaaaagtgttcctatttctccacatcctctccagcacctgttgtttcctgactttttagtgatcgtcattctaactggtgtgagatggtatctcatagtggttttgatttgcatttctctgatggccagtgatgatgagcattttttcatgtgtcttttggctgcataaatgtcttcttttgagaagtgtctgttcatatccttcacccactttttgatggggttgtttgtttttttcttttaaatttgtttgagtttattgtagattctcgatattagccctttgtcagatgagtagattgcaaaaattttctcccattctgtaggttgcctgttcactctgatggtagtttcttttgctgtgcagacgctctttagtttaattagatcccatttgtcagttttggcttttgttgccattgcttttggtgttttagacatgaagtctttgcccatgcctatgtcctgaatggtattgcctaggttttcttctagggtttttatggttttaggtctaacatgtaagtctttaatccatcttgaattaatttttgtataaggtgtaaggaagggatccagtttcagctttctacatatggctagccagttttcccagcaccatttattaaatagggaattgtttccccatttcttgtttttgtcaggtttgtcaaagatcagatggttgtagatatgcgacattatttctgagggtcactgacctcttttttttacccctcaccatatatctgttttttttttatatatccttctctgaatggtgcgttttgagtttttctctctcttttttttttcttccatgggggtggggtggctgctcaagtgttttaactttctaactggtctgttaaacatcttgcattttccctttctccattcactccatataaagccaacaagtttatcttgtcctcacatttatttttgtttttgtctgtcttcatttttattgaattgtaacttacgtaatataagttgcaccaattttaagtatacggcttgttgaattttatttatgtatgtacctctctaagcaacatccatagtgtttgaaagatctgtttcacacatctctgaaatacacagaatgcccttcctacatttagaaattcctacatttccatatttacctttccaattattttgtagtcctaacacataaagaatctgcttgatacagattgttctccatgaaatcctcttctttatctctgcttcctgtcttatgctgttcataattatttcactttactatcccttctgtctaccaaattcctactaacctccattcaaggtgtactttattatgcacttccagcaattattgtctatgacatgaatttagcattagttgactgtatctgtatctgtaatttttccttgaggctggttacagtctgatactaccatgtagatatgtatagatcttgagtactaaactttgtgttgggacataatatacaccagaaactaacactcatttatccttagacttttccaattatatttctcactcttttttttttgagacggagctggagtgcagtggcaagatctcggctcactgccatctccgtagagacgggatttcaccatgttggccaggatggtctcaatctcctgacctcgtgatccgccagccttggcctcccaaagtgctggagttacaggcgtgagccactgcacccggccaaaatttgtatggaatttcaaaggacctaaaatagccaaatcaatcttgaaaaagatgagtaaattttaaagacttaaactacctaaatttctgaattaatctaaagctcaccaagaaagggtttttagggagtaagtatagacatagatgagtgaatggaataatgtccagaacagtcatttgatttttgacaaaagtggcaggtaattaaataggtgaagtatagttttttcaacaaatggtgctagaacaactgcggtatcttttggtggaaaaataaatctttactaacatcatacataaaattaactctaaatggataataggcttagcataaacactaaaactatgaaactttaaaaagaaaacgtaaggttatatccttaaacttgggatagaaaaagatttcttagataaacacccaaaccacaaaatcttcatcaaaattggaaatcttttgggaaaatgttaaatagtgaaaagccatgccacagactgggagaaaatttctgatagaagatagatagatagatagatagatagatagatagatagatagatagatattgaaaacatacaatttaaaatgaggaaaagattttaaacaatcatgtcacaaaagaaaatatttaaaagccagtaagcacacaaaaaactgatcaacatcactgataaccaaggaatactggcaaattaaaactgtgagaataccaattgaaattattaaaaagactgacagtatcaaatgttggtgaagttatggagcttgtgagaatgtaaaattatacaaccacattggaaaatagtttggcagtttcttataaatatttaatatatgaccctgcaatttctctcctaaatattcacccaaggaaaagaaaaacatgtccacatggagactagtatttgaatgttcatagctgtttgagttacaatattaaaaaactagaaacaggccaggtgcggtggctcacacctataattccagcactttgggaggccgaggtgggtagatcacttgaggccaggagtttgagaccagcctcgtcaacatggtgaaaccctgtctctactaaaaatacaaaaaatttagccaggtgtggtgacaaacccctgcaatcccagctactcaggaggctgagacaggagaatcacttgaacctggagacagaggttgcagtgagctgagatggtgccactgcactccagcctggttgacagatcaagactccatctcaaaaaaaagaaaaaacaaaaaactagaaacagctacggaatggatatataaattgtggtatgtatttaaaatggaacactagtcagcaatataaatcaatgaatgacatactgctacttgtagcaaatagactgagaaaatattgtgtgattatatttcattaaattctaaaacaggcagtattcatcccgcataatagaaagctgatgagtggttgcttggggccaggtggttggggagaggatggtttgcaagtgaacacaagggaactttttttgaatgctctttctcttgactatggtagtagttacacaggtatatgtatttgtcagattcatcatactgtacatctaaaatgaatctattgtatataaattatgtattcataaaggttaaagttttaaaaaacattctggcaatggacaaatattctcaacaacctgaaaaaatgagaacacatgtacgtaggcatacaccactttcttaaatatctatttggtaaggaaatctgttaaaaataatgaacattagaatgcttaatatgaaaactcactggaaatgaccagagatgtcttcataagcctgaaaattgtacaattcaaagagaaagaaaataattaaatatttaaataatgatgttaatacacttcgaactgctaaaaatgcaggaggacgaatataacaaattaaaaaataaagtgagctagaaaatcagttgttcactttatatagatttttccacatgaaacaaataagggcaatatcactgatttctaatttatgttggttatggatatatgcaacttttgtaagggatcagctaaatcatctgctttggtagtgtttacttcagtgcctttaacagagtgttatgtagcaaatttgataacgatatactatattttaggctactaaagtggaagaatacattgatgagtttgattattagtgtttgtaagtagcttaaaaaatatgctgctgtaagctagtttatgctgcccatatggagactttgggacctttgttttccagtattcatatccagcttgaaagttttattaatctgactttaataagctatgatattatgatttgtgtaagctgaggaggttaacgctttctttcagtactgggattctgtttctttgcttttgtgtttacaaatttggctattaacttttctaaataattaagtaatttgtaagtttgtatctatacaggtgttaattgaaaagtattacatgaacaagcattaatgccaaagtataaaattcttttatgaatgatataatctgaattcctgtaaacatttctatttgattcagcataatcatgtttatgtctctttttggaaaagagtgtgagtagctggtagtttgtcttctagttcacatgtgtgtatatgataaagaaccatacaattaggtaggtgttataaataggatatggcaaaaaaggcaaacctactcatgtttccaagattttatagcatatgcctggtgaaattttgctattctttaattttgctttttgggttaaccagctgacgcccagttgaaaagacttatgttcgtgtgaggccacaaaagccttaatgttcagtctccagctacctcagattttggagaacgctgtgtaccatcagcagcttgaatccccaccctctaacgctaatgctcatctatcaaacttgaggctaagagtgagggagaggaagcttccagataaacatacagaagtgcctaaacagctaatcactctaggcttccgcttccaggccctataattagaagtccttctttttccttgtattcccagatgacgcaaatgctttttgtggcttggcacctcatttggggcgtgggtttagtttatggccaggccagagtctggtttagtcttctgatgcagcataaatagttctcaagccacagtctactctgcacaagtttttccttttatgtatatgtgcattttaacttgttttctagaagaaaaaaaagcttgctatttccctggcagaatgtgtgcaaaagaggaaattctaaatgaaaagaaagcacgtgactatgtagtcctatactagctatttctttttctcctttctgctctttaaattttttatattatttttaaaattttgtgaaaaaagtaaacttactggtggattgtagaagccacatttgcatggaggggtggaaaaaagtgtttgagataggatacagagaagataataggcataattttttagtggacattttcctgaaaatttgaatttgttttacataatcataactaaacagagatgaatgccagtttgaaaagctaggaacatatgggaacgtgttcatttgtgattttcattcatatgtaaaacaataatagtcttgatttggcaaatgaggacctttatttgaatgctcattctacataaaatggtatgatttaaaacgaaatttaatgaagtttatagtaggtgaggaatatatgttacaaatgcaaattcatcttatttcctgtcagaatgatgtttctattgaattgtttgtcaagtgcagaaaatttgttacagagaggtggagtcagaagatagtagtggatttatgatcattcaaacttagtataactcagcaaaaaagtaggagtggcaaaacactgtctacaaatggacaacaaagcattcatgcctaaacttaggaattcattgtttgaggccgggtgcggtggctcacacctgtaacaccagcactttgggaggctgaggtgggcagattgcctgagctcgggagtcagagaccagcctgggcaacatggttgaaaccccctctctatcaaaatacaaaaaattagctgggcgtggcggcgggcgcctgtggtcccagctactcgggaggctgtggcaggagaattgcttgaacccgggaggcggaggttgcagtgagccaagattgtgccactgcactccagcctgggtgacagagcaagactcccatctccaaacaaaaacaaaacaaaacaaaacaaaacaaatttattgtttgaataacagtaagtaaagaatataaactatgtcaataacctcatgatcatagctagacatataatgagaggtaaggttatatatattgttgtaggtttaataatttattaaattatttataataaatggtacctttcattttctaaaatgtattctcttggaaatagccaggacagtggcatctagtaggatattttaatatagtgactagagctgtaccttatgtttgccaaagaaatagcaaactcaaatttacttcatcttttcactgaaatgactatcttgtcttcccacagatgcttaatattctttcatgcctttttgttcaacaaaacattagtttaaatgcttatactaatgtgattctgcttctgggaatagcaaggtaaacgtagaaaccatccttcccatagaaaacatttatgaaacctggacaaaatacaactgaacaggcacataaagttagatatgtgtattataatctctggaacaaccagtaaaattttaatataaagagatatagctcaaaagtccatagataaattatttatttttaacattcaacaataaatattgttaaaaataagtagtctcaaaacagcaagaaaccatgagaagagaaataaaactgaataaaatgttgaaattagcatttcataaaaattgaatattccaaataaatagtcccataacagcaagaaaacatgaaaagagaaataaaaaacagaaacaagacaagcaaaaataataataaattggtagacctaagtccagccctaccagtaagtactaaatatgaataaactacaaataccaattaaaggcagtgatttgattgaaagagagtgagcgagtgtgagagcacccaactgttatctaaaagaagcctatattgatagatatagagtagaagaatggaaaatatataccatgcaagtaccaatcaaaacaaagttggagtggtaaagttaatatcagaaaaaactagacctcagagcaaggaaaataaccacggttaaatcatgttaaaagggttaattgaccaagacttcatacaatcctaaatgtgtatgaaccttgctctaaaatttaggaagctgatataacttaggaaaactacacatgtccacaattatccttggagactgtaactcctactcagtaatggaacagaaagcagtcagtcagtaaggaaattgaagatgcaaacatcactaccaattacatacctttctagaatatattctaggtgttcaagtgtatatggaacaaggatcatatttcaagccataaaacaaactttaacaaatgtaaaagaagtaacttcttgtcataatgaaattatactggcaataatatctgaaagatatctggaaaatatccaaatatttggtaacaaaacaatatacctttaaataacccacgagcaaaagacaaagcaactaggaaacatttaaaactgaatataaatgaaattgcagcatatcaaaatctgttacatttagctaagcaggcttagagggacattaatacctatatgtgcttactccagaaaagaagaaagttcctgaaacaataatctaagctgctcccataagaaactcgaaaaaaggaagagcaaatgaacccaaaacaaggagaataaaggaaataataaatatagtaacagaaatcagtgaaattgaaaagagaaaaacagaaagttatgaaaccaaataggttaaccttaaaaagaccttaccagactggtgaagaaaaaaaacagagaagacacagattaccaatatcgtgaatgaaaaagtggatatcattaatgtctctacagatattaaaaggatgaattccttgaattacagaaagtaattcatcaaagaagaaattttaaattaaaaaattaacaaaatatttaatggtagttaaaaatcttcaaaaataggcccaaatatttttacttgaaaattcccttaaacatttaacgaagaaataatagcaatcctacatcttttttttccccagaaattaacagagtaaggagcattcccatttgattatttgaggcctggattatcctaaatatcaaaatcatccaaacacattattagaaaagaaaaccacaaatcagtatttctcagggacacagataagaaaatattcaagaaaatattagaaaattgaatctagctgcttataataaaggattttgaccaaacgaggcttatcccaagaatgcaaggcatattcaacatttgacaatcagttattgttagaattcgctatattaatagatttaaaaagagaagccacataatcatttcaatagctgcagaaaagcacttgaaaaattcaattttctttcattataaaaactctcaacatattttacgaaggacttttacaaaaaacctatacataatgttatacttaaagattgaatgctttcctcctacaacacagaaatctctccttcctatttctgcttgcctcagcaaatgcagtaagtcgagaaaattgaagaaaaggcatgtaggtcagaagggaagaaatgaaactgtgattgttcctaaactacgtaattgtcatcaaagaaaattcttgtactgtataaaaaaacccctagaacttgcaggaaacatacattgtcaagataaaaaatcatcaattttatctctatgcactagcaagcaaaaattgatcattttaaaaaatattaccatttataataactctaaaagacaatattttcagaatctgtgtgtcaaacaaaaagaagtcaaaatagatctaaatcaagaaatatgctgtgttaatagatcagaaggcacaatattaggataacagttgtccccaaattaatttattacactcaatacagttccctcaaaatcctaaacaagaatggctaaaataatgttgaaaaaggcaggaaaaggctcattttacctgatttcaagattttctgtgaagttacagtaaccaagaatgtggtattagtgaatgtatagacacagaaattgaattaatagaatagaacttcaaaaataggccttggcctggcatggtagttcacgcctgtaatcccagcactttgggaggctgaggtaggcggatctcttgagaccaggagtttgagaccagcctggccaacatgtcaaaactccatctctactaaaaatacaaaaattagccaggcatggtggcgcacacctgtagtcccagctacttgggagattgaggcatgagaatctgttgaacccaggaagtggaggttgcagtgagccaagaatgcactactgcactccaggctgggtgacagagcgagactgtctcaaataataataataataacaataaataaaaaataaaaaaatgccaggcatggtgactcatgcctgtaatcccagcactttgggaggctgagtccggcggatcatgaggtcaggagatcgagaccatcctggctaacatggtgaaaccccgtctctactaaaagtacaaaaaattagccgggcatggtggcgggcgcctgtagtcccagctacttgggaggctgaggcagaagaatggcgtgaacctgggaggcggagcttgcagtgggcgtagatcgcgccactgcactccagcctgggagacagcgagactccatctcaaaaagatataggcctacacaaatagccaattgatccttggcaagttgacaatgttacttcaatggagaaaaaacagtgtcttcaagaagtctttctggaacaattggacatcttatgcaaataagttaaccttgtccatgttttgtataggatcctcaccttataacctgttgtataaggtcctcacaccttatacaaatattaaaatgatgataggcctaaatgtaaaacataaaattatgaaacttttacaaggaaagagaagatctttgtgaccttgggttaggcaaagaattcttagctatgacatctcatcaaaattaagaactttctctgtaatagactctattggcattttcaataaatatcatggtgaattaagtacaggaagtagtagttggatcagtagataaattggagcgtagaattaaagcttgaagaaattgcaaaagagggagtttcatggggggtatgtcattttcacattctttgttttgaaaaatgattgtggctgggcacggtggctcatgcctgtaatctcagagctttgagaggccacaacagaaggattgcttgaggcccagagtttgagaccagcctgggcaacatggtgagaccctgtctctacaaaaataaaagaaaattagccaagcatggtggcatgtgcttgtagtcccagctacttgggaggctgaggcaggaggatctcttgagcccaggaatttgcggctgcagtgagctgtgatcaggcacctgcaccccagcctgggcaaccgagtgaggttctgcttcaggaaaaaaataaaataaaattatgaattctgtaaattcaggaatatcaaacttctctctgctagttttacaggaatgccataatacttgcacatctagtgtttataccttgctgatatactgatgtgtcattaagcttggtattcacatgaaaaagatattttatttttttcttttgtaaagtttcttatagccttggtaatttttttcccattggtaatattttaaatattgtgaatagctttttagaatatttcatccacatacataatcatttttatttttaccctttgttttttgtcttccaggaatgcttctagtcacaacagacacccttggccatgactttcatgtcttccaaattctgactcatccttggtcctcatcacaatgtgctgtccaccatctgtatactcttcacaggggagaaactgaagccaaagtaagctgtataatttttcagaaggcgatttcttggtgtaatatgacatctactctagctggtcatttatattacattgcagcttaatgttgatgtttgtgagaaaatattgctgtctgtgatagaatgggttagataaatagggaaaaattccgttttgacccagtaaatacataagcactagatgaacatttttttgtttaaaaattcaatgaattttgataaaacagtagggctgtttatcctgcttttcccaacctgagaccatttcttgccccagggaaaactcctgtcattcatttgctgtctctccagaccttttactaggcatttggattctgtgtacataaatatgtatgtgcatacatacacacacatatacatataaacatggacatattcatatatacaaaaatagtttcatgatgaatatggatatatgaatacagtggaggctagtgagaaccagttgcgcacatccctccttggcacggtatttagtgatattattttgattgcgtgaaatcacccatgttgggactatttgatcatgaaaatttgcaaacactacaaatcagggctatttttttcctcagagagctagattttaaacatttaccagcagataatcacgtacacgtgcatgggtacacatatgttcatatgcatgatttactgagcgcttgtatcaggtgccacgctaagtgcttcacatatatttaatattcttatttaatttttaatttttatttatttttattattttttttgagttggagtctcgctctgttgcccaggctagagtgcagtggcgctgcgatctttggctcactgcaacctctgcctcccgggttcgagcaattttcctgcctcagcctcccaaccagctgagattacaggcacccaccaccatgcctggctaatttttgcatttttagtagagacggtgtttcaccatattggccaggctgatctcttgaccaagctggtctcaaactcctggcctcgtgatccacccacttcagcctcccaaagtgctgggattataggcatgagccaccgcgcctggcccacatatatttaatattcttaatatcacatggtagatattgtgtattgtcttaatcgcttaaaatctcaaacaccttttgtttcataccttatatgcacttgccaatataacactgtatatatgttattctacaagatagccatttgaccctactctatttattgactagcctatcattttccaacagtctaaagtgatgtttctcttgaattcccaccaaaataaatgactataatggattgaaatgtcttaaatttagagaacttaaacgctaatagtttataagaatatgtttgaaaaagtattaggcattactctaggttgcttatttactaactcactctgaaaactgataaaccaaaaatatacagtgtttaccccacttttcttgttatcaatttaataagacaatcaagtagttgatgagggaaagttttttcattgaaatattctttttttttttttccctcaagatgaagtcttgctctgttgcccagactggagtgcagtggtatgatctcggctcactgcaacctccacctcctgggttcaagcaattctcctacctcagcatcctgagtagctgggattacaggcatgtgccaccacgcctggctaatttttgtatgtttagcagagaaagggtttcaccatgttggccaggctggtcttgaactcctgacctcatgatccacctgccttggcctgccaaagtgctgggattatagacgtgagccaccgcgcccagcctcacggaaatattctaacataaaactggcttaagtaaaattttaaaaattatttctaaggtttcttatacaattattattattagtagtagtagtattttgaggacagggtcttgctctgttgtccaggctggagtgcagtggcaggatcatagctgagtacagccttgacctcctgggctcaagtgatcctcctgtctcagcctcccaagtagctgggactacaggtgcatgccaccacacctggcaattttttcagtttattttctttttttgtagagatgacactatgttgtctcactgtgttgcccaggccagtctcaacctcctgagctcaagtgatcctcctgcctcagcctcccaacgtgctggaattgcaggtgtgagtcaccaccctggcctattcttaatttttatgggtacataatagttgtacctatttgtggggtacatgtgatattttgatacaggcatacaatgcgtaatgatctcgtcagactaattgggatatccattgtttctttgtgttgggaacattctaaatccaatcctctaattattttgaaatatacaataaattattgttaactatagttacttttgcactaaactaacaaatcagcttctagatatagtctcactttggagaaaatacagaaatagagggataagttaaacaacaccatgaaaatgcaactagccaactctaaaatatgggaagttctacattacaaatatgacttgatttctttaacaaataattgtaattggaaaataaaagttgatgtgtggtgggggaaaggtgaattgttaaaattcaaggagactttggagagtatcatctaagtacaaagcgtggaccttatttaaatcctctttcacacaaaccaaatataaaaagacatttttcagacaagttgtgagatttttacatttgacttactagatattatttattattattagatattatatagataatattaggtattcaggaatttaaagtccttattttttagtgatgcaaaagtatttacagatgtctggaatttgctttgaaatgatctagcagtaggggaggggagggttggttagataataggacaaataagtgacagaagacaatagagggatggttatgttgattataagagacttaaaatacacattgagtaaatgcattgtgaaaactttgtttggaccctgatctaaataaagtataaagagacatttttgagacagttggagaaaattgaccatgaatgaggtgttatttgacatttatcaactataactaatttgctgggtatgtaattgtgtatttgttttgtagagacagagtctcgctgtgttgcccaggctagtcttgaactcctgggttaccacctgggtcttccacagtgttgacataagccactgcatattgccttgtaactaattttttaaaagtcattatttattaggcatatattctgaattatttacaggtgaacagagatgatatctctaatgtgctttaaaatattctagcaaaacaaacaatgagatatagtcaacagatctgcagagcgttaattgttgaagttgaatgatgtccatgtaggtgggtcatgttaacattctctatatttttgtgtatgtttggaaatttctcttaataggaagcaaaaacaacacccttcaccaacttttttacttactttagctttatgacttgatttattgttcgttttcaaaagctttcccagctgttgtgttttagagtgaccttcttgcgttgcatagtgaatcccgtggagatttttatttaaattgcattgaaattacattttaatacagttagaactgacatctttatgttgtagaagttttgcaactaggaattttaacattttaaaatttgtcattgctgtggtatggcaaagctattgataattttgtattgaatttgtgtatgcctgctttgctagattctcttgtaagattaagtagtttttcagtaaattttcttggaatttctaagtggaatacattttctgaaaattattatcttttttgtttttatttttctcttattatattgtctaggaattctaaaatattatgcaactgtagtagtgatagctatactctttgctttttgaataatatcttttattttgacttcattgttttgccctatttcttgcatgtttttcatgatataagtaatacataataacattttggaggtaaattttagacaatcttgaactacatggaacaaaaacatcaaagttacctgacccattaacctctgcacccagagctgctttgcttgtcaatttgttgtgcattcttaagatccccaaacatgtttattgtagatgaaattgttcttaacagtgcagtggtattatatctttttcaattattatcctagcactggagatctgaggattaaaaaaatgattttacttaaccttactaatttgagttctgacatttaaagatcaatagttcttaaaagctatgtatgtttatttctaattaatatctaggggaaaatccaatttactgattgatagggtcttggcattttcttttctttcttttttttttttttttttttttctttggagacggagtctctatcgctcaggctggagtgcaatggcacaatcgcggctcactgcagcctctgtcctcccgggttcaaacagttctcctgcctcagcacccctgagtagctgggactataggcacccgccaccacacctagctaatttttgtatttttagtagagacagggtttcaccatgttggccaggctggtcttgaattcctgacctcaggtgatgcacccgcctcagcctcccaaagtgttgggattacaggcatgagccactgcacttggctgggtcttggcattttcatagtccaagttctatttgaattaattcatgagctttaattaaaatgtaaaaatcttgaatttttatcccttactgtatattttttcctgctttttgtgttcttgttgctacagtttagaaaagactaaagacaggaaatgggtttgcacatttttctttatctctgttattttattctcaggctaaactgggaagtcttatcttttaaattttttaaaaattatttttaaacttttttttttttcttttgagacagagtcttgctctgttgcccaggctggagtgcagtgtctcgatcttggctcactgcaacctctgcctcctgggttcgagtgattctcctgtctcagcctcccgagtagctggggttacaggcgcccaacagcatgcccagctaatttttgtgtttttagtagagacggggtttcactatgttggtcaggctggcctcaaactcctgacctcaggtgatccacccatcttggcctcccaaagtgctgggattacaggtgtgagccaccgtgcctggcctaaacttttattttaagttcaggggtacatatgcaggtttattatgtaggtatattcatgtcatgggggattgttgtacagattattttgccattcaggtactaggcctagtactcagtagttatttttttctgatcctctccctccttccatcttccaccctcaaggaggccccagtgtctgttccctctatgtgtccatgtgttctcatcatttagcttctacttataagtgagaacatgcagtatttggttttctattcctgtattagtttgctaaggataatgccctccagctccatccacgttcctgcaaagacatgatcgcattcttttttatgactgcataatattccatggtgtctatgtaccatgttttctttatctagtctgccattgataggcgtttaggttgattccatgtctttgctattaggaattgcactgcagtgaacatgtgcatgcatgtgtctttatggtagaatgtttgatatcctgttgtatatttactcaggaatgggattgtgctgggttgaatggcaattccgtttttagctctttgaggaattgccacacggctttccccagtgatggaactaacttacactctaacagtgtataagcgttcccttttctccacaacctaaggagcatctgttattttttgactttttaataatagccattctggctggtgtgagatggtttatcctggttttgatttgcatttctctaatgacattcttttgaaaagtgtctgttcatgtcctttgcccactatttaatggggttttttgtttttttttcttgtaagtttgtttaaagttcttatagatggtggatactagacttttgtgagatgcatagtttgcagatattttatctcattctatagattgtctgtttactatgttgattgtttcttttgctgtgcagaagctctttagtttgattggagcccatttgtcaatttttgcttttgttgtgattgcttttggtgtctttgtcatgaaacctttgccagttcctgtgtccagaatggtattgcctaggttgtcttccagagtttttatagttttgagttttatatttgagtctttaattcatcttgagttgatttttttttttttttgagatgaagtctcgtttttgtcacccaggctggagtgcaatggcgtgatctctgctcactgcaacctctgcctcccgagttcaggcgattctcctgcctcagcctcccgagtagctgggcttagaggcacctgccaccacatccagctaatttttgtatttttagtatagatggggtttcactatattggccaggctggtctcgaattcctgaccttaggcaatctacctgcctcggtctcccaaagtgctgggattacaggcgtgagccactggagttgattttttatatgatgtaaggaaggggttcagtttcaaccttctgcacatggctagccagttacccgagaaccatttattgaatagggagtcctttccccattgcttgtttttgtcagctttgttgaagatcagatggttgtaggtatgtgtccttatttctggggctctctagtctgttccattggtttgtgtgtctgtttttgtattagtaccatactgttttgcttaccacagtcctgtagtatagtttgaagtcaggtaacatgatgcctccagctttgttctttttgcttaggattacgttggttatttgggctcttttttggtttcatatgaattttaaaatagtttgggaatcttattttagaaaattgtggtgaaatgcaaaaaaaaaattccaccatttttaccattttaaagcatacagttcaatggtattaattcacactgttgtgcatccatcaccatcatctaggtaatcttagcctttagcattgaatgacttttctaagctatcaccatttaacattttacccatactagtagttccttgattagagaaaaactagaaaatggaattttagtcattaacacagtgtcttttcttctaatgttcccatcaggcaaattattatttatgtgcaaattttaactcattcatgagtaaatatgggaatatttaacatctcatacatataatgcccaatttctttcttctggattaaatacttaaaatatttttaccttcttgagggtaataaggattattatatctgttttattcttcaccaaaaatacatacaatgcatacttttaaagttcctactgagtttaatgaaattgatttttctattaagatttcattttagaagtatattcattggatcatgatttatatttttcattcatgcaatattcatgttaaaaattaccttatttcttctcttccttatctaggtggaatcaattcttctcttccttgtgttactcattttacgccccattatagtacttattattttgtattttgactggttgtctacttgtttgtctccactaatactgggatttcttttaaaaataaattgtacctcattgatttttatatgcataggccttccactaaggcagatacatttttttccttggaccatttgaaagtagattgccaacatgacatgatgccctattaccctcaatgcttgaatgtgtattttctacaaatgagaacattcttctgtgtaaccataaaaaagtcaaatcaataaattttcaccatctaattttgaaagtccattttggtttcactgattgtcccagtaactagctaaaggatctagttcagggaaactgaatttttttttttttttttttgagacagagtcttgctctgtctccaggctgcagtgcagtggcgctatctcagctcactgcaacctcccgactgcctggttcaagcgattctcctgcctcagcctctgggattacaggcagacgccaccaagcccagctaatttttttttgtaattttagtagagatggggtttcaccatgttggtggccaggatggtctggatatcctgaccttgtgatccgccctccttggcctcccacagtgccaggattacaggcatgagccaccgtgcccggctggagactgaatttttatatctctttaatctccttcattctggaacaggtcattattatttctttgccttttatgctctcggcacatttaaatattacaagtaatttatttttgtcaaaagtgcctcaattttttatctgatgtttcattatgattagatttagcttactcatccttgacaggaatgtcacagagtaggtgctggttcttattgcatcctatcaggttgttactgattttgattttgatttgttattgatgatgatcagtttaatcacatgactgagatgatgtctgctggtcttcctcactgtgcagttactcttttgtacttataaaaatttacaaggtttttggggcagtaatttaaaactatgtaaatatgccattctgcattgaactttcaattcattcctttatttacctatcattttggtctcatagattcctattttattcaatggattatatttgttcaataattacttattatagtgcacaaaatgtcccacatttggccagtgggagcccaataacttggtgtctgtgtccttttgacatatcttcaccactttctgagcttgtccttactttctggcacaactaacttgcttacccttaagtttaattattatttgtttttgtctcttttgtatggaagttttaaatttgatgagcattttatctagagttaatatttcactgtgctgctgggcacattttatttcttacctctttttcaaatcccatcccatctgttctagtcactgagatgctctacctcatctctgaccttttagaatttggatattttaagcacttaacacctatttttgatacctctttgtattaaagttatttgccatttaatttatctataagttcaatatggaaatagaaattttgcttaagcttcttggcatctctcatgcatagaatggagccttgcatattgtagtgcaaatgtttgctaatgccagtgatgttcctacttaacaggtaggaaagtcaaatagaaattatttaaatgattatgctctagaacacactctgtatgggagactgggaatttctaaaccccaaataccaggacctcagtgaccacaaaattaattttataaggttctacagaaaattattttgaactgatatataaaatttaacaccagtcgtgaaatctatatgtcacatgatctgtttggccctctttgagtactacaaaagcatgtttttctggattcttccaagaactctgacggtactttaatcaggcaaggaaaaaaattcagtatgtgtatctaattatactgaattaagttgttttgtggtctatgacttgggatatcctttgcatctgacagtaattttcctcgtaaagcacatatgcagtaagaaaaatagtccttgttttcaacagtaagtataaaccttacacatattttgttaacatactttctcaaacagactcaagtcatttttgtacttagcatgctaattttggcaaatggcaaacttgcttttgaaacaaaatcagaaaagtgttaattttaccattctagaataatactgtgaaataatatagttagtatcttcaattgtcaaggggaaaatcatctagttattcagtgttattaactgataactatttgatggtcattttagataaatgcaaatatttgtttttagtgtgaacatgttccaaatatttcctagttatggttttactaatattcaagtttaactgggctttctgtatttatttttgtgaatctagcaaccctgtgcatgaccctatctatagtcatgtaattcttcagtttttctgcaaaaacgtcatttttattgagatataatttacatactataaaattcatttttagaagtgcaattcagtggtttttgttatgtttttacagtttgcatatcatcactagtatctaatttcaggacatttttgtaatccttaaaccacttatccattagcagtcactcctcattcctgttttccctgctcccctatatacttggatgctgattagtaattatataactaaggacaggctaaataccttctctaatcttcaagttactcttctgtaaaatggggccaataccgatttcagagtttattgaggaaataacagaaatactatatgtaaaatgcttagcaaagcactggcacagtaaatgccaaatacagagtcaatattaggacctctacttttggccaatatagcgttaagagctggattaaccctcctacctgaaacaactaaacaatgaacagtagttttctatttactgtacattagtcattgaaagatggcaatccctgatagatgaagaacaaatgagaggatgcctatggttgccccagtttattgctttgaaagagtttccagtcatggtgcaggaagggggaaccctagtggagcctagcagtctccctgaattgatgaggtattgctaagagtcctgggaggccaagatcatagattctcaatacactggaccagagacatgggagctgcagagagagaatcccagagatctgcagaggagacatgcgaacaaagaaagaactaccgtcagatcagaaaggcaagagtaaaactatcttttattcaaaaatgacatgattgtctatgttgaaaaactaaaggattttattttatttttaaaaaactaataaatgattttaacaaggttacaggatattagatcaatatacaaaaatcagttgcatttctatatactaacaacaatgaattgatcatttaaaaaatccagaagtgtatactactgacattcaataagcaagacttgtactctgaaagctagaaaatattgctcagagtaaagacctaaataaatggagaattaaaccattttcttgtgctagaatacttaccatcattaaaatgtcagttcttcccagatttatccatagactcgatgtaatctgcatcaacatcccagcagggttttcttttggttaaacattaacaagataattctaaaattcacatgaaaatgcacaacacttatgagcaaaataattttgaaaaagaaaaagttggagaaatgtcactacctatatcaagacttactaaaactacaataatcagtagggatcctgtgaccattcccacacatgtggagacaacttatttttgacaaaggtgcaaagatacaaagtggagaaagattagtcttttccacaaattaacaaattaactcaaattagatcatagacttaaatgtagaacctacaactatgaagttattagagcaccaaaagaaaccttcgtgacttgggttagggacagacttttaaaatgtgacaccaaggttggacacagttataattccagtactttgggaggctaaggtgggaggatcggttgaccccaggagttcaagaccagactggggaacatagaaagactctgtctctacaaaagcaaaaaaaaagttagccaggcctggtggtgcatgtctgtagtcccacctccttgggaagctgaggtggaaggatcgcttgagcctgggaggtcaagactgcagtgagtcatgatcacaccactgcactccagcctgggaaacagagcaaacccctgtctcaaaaaaaaaattttttttttggttttgtttttgctttgcaaaattttctattccaaagcccattaaagaaaaattgataaactggatttcatcaaaatgaaacacatctgctttttgaacaaaaccattaagagaatgaaaagacacaagttgtatgtcttatgtccacaatacctttaaagaactaactccccacagtcagtgaatagaggaactaaatttctcatatttcatacattgctgttggtacagcttctctgggaaataattttgcatttacttaaaatattaatatgtacttaccatagaacccagcaatttcagtcctggggcagattgttcatattataaaattcatgttgttcaggatgatgtccagatttactcaatggtttttttcctgtggttactacaacaaattgccatgaacttgggagcctaaaatatcaaaaattattctcctacagttttggagggcaaaaatctaaaatcaaaatgtaagcaaggctgcacttcctttggaaattctgaggaagaatttgttctttgccctttctagcctttgatggcctttagcattctttgagttatagccacatcactcagtctctgtctctctgattgtattacatcctcctcatttctgagtcagctcctcttctgtatttcttgtaaagatacatgtgattgttttaagtaccaacctggataacccagggataagccccttctcttaggatttataacctaatcacttattttgccaaagagtaactctttgatcctttgagggatgtggacatgtcttttgggggctataattcacttctctgtattctatcctctgcctcccagaattcatgttcatgccatatgctaagtattacctcttttccctaccaacatccccaaaagtcacaacccattcattacagcatcaactctaagtctaaattttttttaaaaatattatcggctcaaaggtccaatcttatcatctcaatcatctgactctggtatggttgagactctggaatttatcctagggcaaaattcctgtgcttctgtggacctgtgaaactacaataaaagttacctcctgccaaaatacagtagtaggatatgcgtaggatagacatttcaaaaggaagaaatggaaaagaataaaagagtcactggtttcaaacatgtttaaaatctagcagggcaaattccattgtgtttcaaggccagagtttcccatctggcttgaggcactgccctcctggactgcggcttcattttctgggcctgtggctctgcccattcctgcctttgtacacacagcttaggcctttaagtgcacatctctgcccttggagtcattcatacattttattgaagggtagcacaggtttgcacctaggtagctctatcagcctgtttcctgcttgtggaattttgcaagtccagtagctgccttcttcttctttttctttttttttttttaatcatgcctttgtgcctttcagtccaagatggcggtgtttctgcagatactacattctcaaaaaccttgtgtatctcctgtgtatgtcatggggatccatgccatcagacaagaggacactccacagatctttcttgcatttgtctctctattcctggcttctgctgattgagtggatccatgaaacacatgcctgatgtcttcagcagaatgttgtcaagctatactcctggccttcagagcacattttcccaaccatgaaactcctcatagtaacatctttttctccttggtaggatattcaaataccagaagatccaaaggaagtattattgaatggtaaaataagaagcactctgaatggcagtaagggagacatttgaggtcagggagaaattttgaaaaacttatatcataaattttgtcatttagctatgatggaatgataggaactggattaaacctctgtatccgttaaggttctaccagagaaacagaatcagtagggcattacagaggtttatcagcatacatgattctggcggctggctaggctagtctgaaatcagtagggctggccagaaggaatgtccaggtggaaactgtcatgcaggagctgctgcttcaatctataggatcacaatagtcacattagcagaatgaacctcgagattacccagatgtagtaaattataaaaattattttatttttaaaataaattttcaattttggaatcattttagagttacagaaaagttgcaaagatagtatagaaagtttctataccatatcaaatttctccttttttatacttaaaaaaatatacatataaaatttactatctttaccatttttaagtgtacagttcagtggtaataaatacatttctattccttttcttccccttcattcaccctgccccacacttcctggcctctgataactgccattctactctctatcttcatgaggcccactgctttttttttttcacatcagatggataatgtgctgacattgtaacgaggcttgaggaaggcacatctcacacagcagtgtgaaaacccactcatcatgcttatgaactacaaaaggatcaaagatccacttttgtagttcccacctaggagtgagatcatgcaacatttcactgtgcctggtttgtttctcttaacataatggcctccagtttcagctatgttgctgcaaatgacaggatttcattcttttttttaaagctgaatatttcattgctatatataccatatatgctttatttattcatctgttgatgaactcttagagtgattccatattttggctattgtgaacagtgctgcaataaacatggaagtacagatatcccctagatgcattgattttctttcttttggctatatacctggtagcagaattgctggatcatatggtaattctgtttttagttttctgaggaacctccatactgtgctccatagtggctgcactaatttacatttccaccagcagtgtgcaagggtctcttctccacattctcaccagcatcttttattgattgtccttttgatacaagccatttttactagggtgagatgatatcttgttgtggttttgatttgtgtttctctgatgactagtgatgttgagcattttttttcatatacctattggccatttgcatgtcttcttttgagaaatgtgtgttcaggtcttttgcccatttttaaattttcttattttttcttttgtttctaatggggttggattttgcccattttaaaattggattatttgggggtttttgctattgagttacttgagctctttatatattatagttataaattctttgtcagatggatagtttgcaaatattttcttccattctgtgggttgtttcttcactttgttgattatttcttttgctgtgtagaagcttcttagcttcaggtaatcccatttgtctattttgctttggttgtctaggttttgaggtcttacacaaaaaggctttgcccagaccaatgtcctggactgtttctccaaagttttcttttagtggtttcatagtttgaggtcttagatttacgtctttaatcgattttgatttgatttttgttatggtgagagatagaggtctagtttcattcttctgcatagctatccagttatcccaccaccacttattgaaaagactgttcttttaccttcttatgttcttggcgtctttgtcaaagacgaattgactgtaaatgcatggatgtatgtttggtttctctagtacgttccgttggtctgtgtatctatttttatgccggcaccatgctgttttggttattatatacctgtagtaaattttgaagtcagaaagtgtgatgccttcagttcctttggctcaggattgctttggctatttgtggtcttttgtggctccatataaatgttaagattttttttttcctatttctgtaagaatgttgttggaattttgatagggattgcattgaatctgtaaactactttggatagtattgtcgttttaacagtattctttgatccataagcatggaatatctttccatttttttgtgtcttcttcaatttctttcatatttcatagttttctttttatagatctttcacttctttagttagattgagacctaggaattttatatttttgtagctattacaaatgggattgctttcttgatttctttttcagattgttccctgttgatgtatataaatgctatcgattttttttttttttttttgagatggagttttgctctgtcgcccaggctggagtgcagtggcgcaatctcagctcactgcaagctccgcctcccaggttcatgccattctcctgcctcagcctcccgagtagctgggaccacaggcgcctgccaccatgcccagctaattttttgtatttttagtagagacaggctttcactgtgttagccaggatggtctcgatctcctgacctcatgatccacccgcctcggcctcccaaagtgctgggattacaggcgtgagccaccacacccggccaaatgctactggtttttgtatgttcattttataacttgcaactttactgaatttgctgatcagctgtaacaattttttggtgagttctgtagccttttctggatataagatcatgttgtctgcaaacaaggctgatttgaattcttcctttccaatttggttgctctttatttctttctcttgcctaattgctctggccaggactggcagtattatgttgagtaaccgtagtgagagtggacatactcgtcttgttccagtctttagaggaaaggccttcattttttccctgttccgtatgatggtagctgtggatttgtcatatatggtctttattattttgaagtatgttgtttctatacccattttgattaggggtttttttatatcataaaggatgttgaattttataaaatactttttcagtatctattgaaatatgtggtttttgtttttgattctgttaatatgatatatcatgtttattgagttgcttatgttgaaccatccttgcatccctggaatgaatcccatttgatattataaatgatctttttagtgtgttgttgaattctgtttgctagtattttgttgaggattttcacatatatgttcatcacggatattggcctgtagttttcttttcttgttgtcgtgtccttatctgattttactgtcaaggtaatgctggccttatagaatgagtttggaagtatgtcctcctcttcaatttttttgaagagtttgagtacaattggtattaattcttctttaaatgtttggtagaattcagcagtgaagttgtgaagtcctgggattttcttgctttttatggaggctttttattacagcttcagttttgttacttgttattggtttgttgaggttttctgtttcttcatgattcaatcttggaggttgtatgtttccagaaatttatccatttcttctaggttttccagtttgttggtatataattgttcatagtagtctctaatgattttttgtgtttctgaggtctcagttgttatgtgtcctttctttgtttctgattttatttatttaggtcttctctcttttttcttagtctagctcaagacttgttgattttgtttacatttttgaaaaccaatgttttgttctattgatctgtatttctttttagcttcgatttcattagttcctgctctgatctttattatttctgtctttactatttttgactttggtttgttcttgcttctagttccttgaggtatatcattaggttgttcatttgaagcctttcatttttctgatataggcatttattgctacaaacttgcctgttagtactgcttttgctatatcccataggttttggtatattgaattttttttttttttttttttgagatggagtctcactccaggctggagtgcagtggcgcaatcttggctcactgcaacctctgcctcctgagttcaagtgattctcctgcctcagcctccagagtaactgggattataggcgcccgccaccacacctggctaatttttgtatttttagtagagatggagtttcaccatgttggccaggctggtcttgaacttctgacctcaagtgatctgccccctcggcttaccaaagtgctgggattacaggcatgagccaccacgcccggcctatatattgcatttccatttttccattttcacttgtttcaagacattttaaaatttctttcttaattaatttcttcattgacctattggtcactcaggagcatgttttttaatttctatgtgtttatatattttccccagttcttcttattaagttctagttttagtccattgtggccagaaaagatatttgatatgatttttattttaaaagttttgttcagatttgttttatgacctaagatatggtctcttctggagaatgtcccatgtgctagtaaagaaaatgtatgctgcagcagttggataaaatgttctctaaacgtagttaggcttgttggatctggtgtgtagtttaactctgctgtttcattgttgattttatgtctgaatgatttgtccattactggagtggggtctccttcttttattgtattgcagtctatctctgttttagatctattaatattttctttatagacttgagatgtccagtgttggttgaatatttataattgttacatatgtttacttaattgacccctttatcattgtatagtgtccttctctgtctctctttataatcttagattggttgtctattttttcatgtaagtatagctattcctgctctgttttggtttccagatacgtggagtatcttttctcaccccttcactttcagtctatgtgtgtctttataggtgaagtggatttcttgaaggcagcatgtaacttggtcttgtttctttatccattcagccactccgtgccttttagttggataatcgagaccatttacattcagccttattattgataagtaagaagatactactgccattcttttgctagttttctggttgtttctttcttagtgccttcctttgtgggtaagttattttctctggtattatgctgttaatttgttgcatttctttttagtgagtctgttacaggattttgtgttacaagtttttgtgttgtggttaccaggaggcttatagagacatcttataatagatataacaagttattttaaagagactacaacttatcttagatcacaaatagaagagtagaaacaaaggcaggcataaagaacatgtaaaaaaaatttatacttttactctatcacccaacttttttttttttttttttttgagacaaagtcttactctgttacccagtggcacgttcttggctcattgcaacctccgtctcctgggttcaagtgattcttctgcctcagcctcctgagtagctgggattacagacatgtgccaccatgtccagctaatttttttgtgtttttagtagagacagggtttcactgcattggctaggctggtcttgatctcctgacctcaaatgatctgccctctaaaagtgctgggattacagatgtgagttaccatgcctggcacccccagcatcttgacttttggttatatcagtttatattttttgtattacctatgttttaacaggttgctaatagcgattattatttttgatagatttatcttttgggtttcatactagagttatgagtggattgtacaccaccatttcagttatagagtattttgtgtttcaccatgtactttttaccagtgggttttataccttgaaaagctttcttttagcacatcagagttttcttggttcagattgaattattctcgttagcatttcttgttaggtgggtcaggtggtggcaaattatttgtttttgtttgtctcagaaatactttatttccccttcatatttcaagtataattttgctgaatgcaatattcttggatggcaatgttttctccttgagcactttgaaaatgttgttatactccctcctggcttatatgatttacactgggaagtctgttgccagacaaattggagatacagtgtttgcttcttttctcgtgctgtttttaggatcttctctttgtccttgacctttgagagtttcattattatacgtgttagagtacttttatttgggttgagtgttgttctcagtccttcctataactggatatttatatctttcttaagttttagaaagttttccattattatttctttggctgcattttctaccctttagtcttatctccctcttgaataccaataattcttagatttggtcttttgaggtaattgtctgcatcctgttggtggtattcattcctttttgttctttgtccttctcccaccaccccccacacccccaattgtattttcaaatagccagtattttaggtcactgattctttccttcacttggtccattccactgttgagagtctctgatgacttcttcagttcagcaaatatgtttctcagttccaagatttctatattttttcccaatctctttgttaaatttctctgataaatttctgaattgcttttctgtgtgtttgttgttgttgttgttgttgttgttgttttggagatcactgagttttcttaaaactgctattttgaattcttggtcagagggctcacagatcactctttcattagggtctgtcactggagttttgctttgtccattggagaggtcataattccctacttgctgttgtttttttcgtgtgtatatctgtatctttgcattgatactttatttcagttttatctgtctaccttgttttgattttattgggtatattttgcttagtgcattttttttaatccttttagagtcagggctcattttgttgcccaggctggagtacagtggtgcagtcattgctcactgtaatcttgaactcttgggctggagcaatcctctaacctcagcctcctgagtagctaggactacaggcacgtgacaccatacctggctaactttaaaaagaattttttttgttgttgttgttagagacagactctcattgtgttgccctgcctgtcacaaactcctggcctgaagtgatcctctcacctgccttggcctttcaaggcactggaattacaagcatgaggcagcgtgtctggcctgttagtgaatctttacagctaagttgttgccttttttttttggatataggtggtacctaaagcccaggttcaccttggctctgctaaatgattgtagtactgcctatcctgatttgggagcatcccaaagtggttatccccacagtgtgtcaagtctggctaggggtttgtgcccagggacctttgtaatgtattgcctactacatggtgctgctgaacagccactctaatttggtgtctcctttggccaagtaatggaacaaagtttccagggctagggatggtagtctagcctccccactttgtcttggcctgtcctcagggttgtttctcccatcaggcagccacgatacttcctgccagttaaggcaaggatagttttcctgccagagcacccaagatggtgggaaagctggtttaccacctcagtctcactttttccagtatagtcaccatgagttggggggggagattttctgtgctcttgatgccaggcagaatcgggggaggggcattacagatctggaagtctgaatctcttaccattcactctgaggttttctttttcacttctctgtggcctcaggaattgtctcatcctcatatttgagttctgagtgtttctggttaaaatctcggtactatatatttgtttttggttttctgcaggggtagtgaagccagctagcttctataccaccgttttggaactggaagtctccatcttctagtagaaattattttaaagcatctattattactatgctcagtgatatgaaggaaaatatgcttcttttaaataaaagggtaggaaatgtcagcagagaaagagaaaatataggaaattacctagtgaaaagtctacaacttaaaaatacaatatcaaaaataaaaatgaaatggatgtgttaatagcagaatttgagtgagtaaatgaatttgcagatagatcactagaaatttccaaaccaaatgagtgaaaaaatagaaaataagtagagccttagcaacttgtgggacaatatcagagccaacatacatgtagttattgcagaaggtgaggagagtaagggaggaaaaaaaatctaaaagtgggaaactttccacttttgttgaaagacatacatttacaacttcaaaaagataagcaaacaacacataagattaagtacaacaaaaaccatgtcaaaggacatcatagtcatttttctgaaaaccaaagtaaggaggaaatcttgaaagtaggcagacaaaagtaatgcattgcacacacagaaagtacattttaacacactattgacttctcactggaaaccatggaagtcagaagacagtggaataacatgtctgaaggactcaaagaataaaatattggccacctgaagttttccatcaaacaacaatatctctcaaggatgaaggagcagtaaaggcgagacatccacactgtaaattatgctaatggcacataataccagaagcaaacttgcagctttaggaaatagtgaagaatatggtcatttcttgttgaatagaaaggatgatttttcccttttaaaaatttgtgtctaatatatgggaatgattgaattattttgttggtattgtattatatgtacatgtaatacatatgacaactatagcacaaagatggagggtgctagggtggaggcaggtatatggagctgtactattgcaaggttcaacattgctatacataaaaaatcaatgcttcaatgaaaatggcatactaaaaaatgttcagttaatacaaaagacaggaaaggaaaggcagaagcacaagaaaaagagggataaacagaaaacagatattaaatggtatatcaaaattcaaccatatagaaattaaatattaatgtactccaatataaaggaagaaattgcctataaggtagtgttgaatatagagacattaatatgatagtaaatgtatattaaaagatacatcatccaaataagaaacataagaatattggaaattcaactatattagtatcaactaaaatagaatttaagacaaagcctattaccagagatattttgtactgttcaaaagtcaaattatcaggaaaatttaaatgtatgcacgtagactcagttttaaatgcacataatttaaatgcatcttgacattttgggctgtatgataaaaaataaaataaatgtatgcatctaaaactgagttttaaaatacattaaataaaatcagaattaataggatgaataattctacaatcagcattgttgattttaataccactttcttgatgttgatagaatagagaaaaaagacataaattattagagtaacactactagctacattggcctattagataaccaaacccaacaactgcagaatacatattattttcaattatgacatcatgcctagtttgaatggatatgaaacagtggataatagatgatacttaagtcagaggcaaaacatttattatggatggatttggatggcaatcacagtgcagtgcagggtactgtaggcttgataagcagcttgattccagtcatttccatcagtgaatagaaccttaccttggctgtgagtgatccagattgttcaattagcaactatgatttgtttgcagaactcatggccccaaagaggtgcatctgtagtctgcgagtgtttagtcttccttgtggcagatgagaccactggccaggccattgccaactgaggaaaagtcagtaaaaatgaaacttctagagggttttcagaattaggaggcggcgaactttttctttaaaggaccagataataagtatctttgactctgcattccatattgtctctatactcagttctcctgctgtcatacaaaagcttccataggcagtacataaatgaatgggcacagttggcccaccgacatagtttttacctaaccctgaattaaagctggggtgatggctttgcattattctatcatgctggttgctccttatttcaatcagccttccagagttgttggggttatacagctatcaaggcccagtgggcatcatcaggtttcatcttagctgagccatcagtcaatcaggcccaggtatttaaaggaagctctgtgaatccagtgcctcttgagccagtggcatgcttctgacagtggaataaaagataaagtggctgtaatacccaaggttctgctcaaccagactggctgtactctggaatataccatttccatttgaatagcggtccctgttggttgggctcttcccaccttgttcattttcaaattttagttgacccatccccaagtaggtctagaaagtcacaaggcctccatgggtcagttgttcaattacaattagaactttgtagctggttaatagcagccttctaaaaaagggagtgtacttggtggctgcatcaggcaggtggcgatgttgtactgagataacacctctgagtacttcagcagccattaagtctttacctaaacattttactcttggaatcctacgttgtttctggcatataatatgggaaggaactggaagtctagtaggtggtctgttgtgcagttgtcccactatcaccttggtgtacatgttcgatgatatcctctggcacaagcatttaagtacagtcatgtaagccattaataccagttatatattcaccaacataagtcaaaatgatagtacattgaatcggactaaagggtcccaccattttatatcccattccagtgtatttttcctccatgaaaagcatggactagcgtttttaatgtgcacatgccagttgctccagtgacaattgcccttcagtaatgttatcccctgtgcatggcaggggaagctaccctttgcataaggtgggacagctaggatgttgggcttttatctcacttggccttttttttttttttttttttttgagacagggtcttgctctgtcacgtaggctagagtgtagtagtgcaatcattgctcactgcagccttgaactcctgggctcaagagatcctccacctcagcctcccaagtagctgggactacatacagttgcataccaccatgcccagctaatttttataaaaattttttagagaggctgttgctatgttgcccaggctggtcttgaatccatggcctcaagagatcctcccactttggcctcccaaagctctgagattgcaggcatgggtcactgtgtccagcccgaaagtgcacgtgtttttatcagttctgaaggataaaaaatgttgaagtacatggctgggaatgtttctagaacttgtattttaattcccttttttatatttctatatgttttcattaaacataacctcatcaaatggcttggactttggcaaggtagttattgctatatgcagttatctttatgataactctcttcgtcttgagactttttatccgagcattgctcttgggttttctttcttttccagtagggttagaaagggcgttgttattggaatcattaggcatacttttggccatagaaagaaaaccacatttaacaatggttttttaaaatcagtgtttattttttatcacgttataaaatgtttgctgctggtcttggctgaatgatgtctatgtgactttttttgctctttccctcatgattcctttataaatgtcacttccctgggcatcatttcagacttcaaggcaataagaaggggagaaagggcaccatcagtgatgttaatttcctttatcaggaaagcagatactgttccagaatcctgcaatagccacctgcctttgagtgatcataactatgtcaccacttgttgtaaaagaggctaggcaatcacagattaagtatctgtggtggcatccagtgaaggagtgaatgttggagatggatgttggatttgcctctcagtagttaaatctatataatcatcaccacaatcaagatatagaatagttttcttatctcagaaacaactttcctcctgccctttttcgtcagtgctctctgccctgctgctgccctagacattgctattaccttattattaatatatatatatatatatatatgtatgaaggagtcttgctctgtcccccaggctggaggtcagtggtgtaatctcagctcactgcaacctccacctcccaggttcaagcgattctcctgcctcagcctcctgagtggctgggattacaggcgcatgcaccacacccggctaatttttgtgtttttggtagatacagggtctcaccatgttggccaggctggtcttgaacccctgacctcaagtgatccacctgcctcggcctcccatagtgctaggattataggcgtgagccaccacaccctgcctaaaaatattttttctgtaatttctaaggtttgatatggggttggagggaatgctgttgctggtcactttattttctaacttggtattgctgatcagtaccagagttattatttaagtattctaaaaatgcatatttcttggtcatcccccctcctacccaaataactgctgaatcataattctgaagatgtgaccacaggatctgcattttgtacagatcatctaagtgcttcttatcacactaaagtttaacaatctctgcttcaggtttttttaggatgttaaataatcccaaaatgttatcattcttattaattgaggttgttattgagtttttggtggtgaattcacagccttataagatgctgatttctacatcttagatgctgaaatgtagtaacatttaattctagtacccaatcctcttgtttcatatgtactttgacttcaacccattttgtgaattaatttttttaagttttgataaaatgttgaacatagatgaaaacactctttagaaattttatgttccatgtgagtatatctactatattagatattggtttccccaaatattacagttttgaattctcaaatcgatgaaatatttaaaaatgaataactcagattacataaagtatttgtataaatcggaattactggactatgactacagtacgttttaaagaacaaatatcttagcattttagaggcctaattggtttctgattagccaaattttatatcattataatgagaaatgtgagatattataaatatgctaaataatacaggaaacatttaatgaatggtaaattacataacctaacataaatttgcaaaacatttaattaaacactgtaatactgtatttgtatctcattagttgagaactctgacatttgtatacttaaaaactctaaattggtaataatgagtgccctaatgaggattcccagattaagttaagtgctgtttgcttgagtttttcttcttatggcacacttttatgctgaatggaaggaaacttaataagaacatctggttataccttttacccatattatattcaagccatttgttttttttgttttttttgcttttttgtttttttttttttgagacggagtctcgctctgtcgcccaggccggactgcggactgcagtggcgcaatctcggctcactgcaagctccgcctcccgggttcacgccattctcctgcctcagcctcccgagtagctgggactacaggcgcccgccaccgcgcccggctaattttttgtatttttagtagagacggggtttcaccttgttagccaggatggtctcgatctcctgacctcatgatccacccgcctcggcctcccaaagtgctgggattacaggcgtgagccaccgcgcccggcctcaagccatttgtttaacccaaccccagatgtgaaatgagccacgataggcacagataaaaatgctcgtttaggcttctcagcagctgcttatcttcctttgtgcataggacagcaaaggcatctctaagaactaagggggctattaaaagaaaccacaaactataaaaagaggctatagaacttcactttcaggaaactggctagttagtgttcctttcatttttttatgacagatttgttgaggtataattcacatacataaagttcaccattttataatgtacaattcagtagttttttagtatattcagttatccattgatcactaccattcaattcaagaacattttcagcaccccaaaatgaaccttgtacctatccaagtcactctccatccccctctccctgctcctctgcaattactaatttattttctgtatctgtggatttgcttattttatacatttcatataaaatggaatcatacaatatgtggccttttatgtcttgtttctttcactttgcataatgcttcaaagttcatccattttcaaatatgcatcagaaacttcattcctattcatggatgagtaaatactatttcattatatggatatatgacattttgtttattcatttatcaattgatagacatttaagttgtttccacatttgggcttaggaatccagctgcaaacatttgtatatagatttttgcttttttttttttttttttttctttttgagatggagtcttgctctgtcgcccaggctggagtgcagtggctcactgcaagtgcaagctctgcctcccgggttcacaccattctcctgcctcagcctcctgagtaactgggactacaggcacctgccaccacactcggctaattttttgtattttttagtagagatcgggtttcaccgtgttagccaggatggtctcaatctcctgacctcgtgatccacccgcctcggcctgccaaagtgctgggattacaggcttgagccaccacagcttgtatataggtttttgtatgaacgtatgtttttagttctcttgaatatctatctaggagtgaaaatgctgggtcatatggtaactttatgttaaacttttggaaacaatatatatatatatattttttttttagtatttattgatcattcttgggtgtttctcggagagggggatttggcagggtcataggacaatagtggagggaaggtcagcagatgaacatgtgaacaaaggtctctggtttttctaggcagagggccctgccgccttccacagtgtttgtgtccctgggtatttgagattagggagtggtgatgactcttaaggagtatgctgccttcaagcatctgtttaacagagcacatcttgcactgcccttaatccatttaaccctgagtggacacagcacatgtttcagagagcacggggttgggggtaaggttatagattaacagcatcccaaggcagaagaatttttcttagtacacaacacaatggagtctcctatgtctacttctttctacacagacacagtaacaatctgatctctctttcttttccccacatttcccccttttctattcgacaaaaccgccatcgtcatcatggcccgttctcaatgagctgttggatacacctcccagacggggtggtggccggacagaggggctcctcacttcccagacggggcggccgggcagaggcgccccccaacctcccagacggggtggcggccgggcgggggctgccctgcacctcccggacggggtggctggccgggcgggggctgccccccacctcccggacagggcggctggccaggcgggggctgccccccacgaaacaatattttttaagcttttattttttagagatggagtctctaaaaatatgcattgcacaggctggagtgccgtggctcaatcatagctcactgcagcctcaaattcttgggcaccagcgatcctcccacctcagcctcccaagtgattgggactataggcacatgccaccacacctggctatttttcttttttctttttgtagacacaaggtttcactgtgttgtccaggcttatctctctggcttcaggtgaaccttccacttcagcctcccaaagtactgaggttacaggcatgagccattgcatttggcggaagcactttctttttattattattattattattattattatactttaagttttagggtacatgtgcacaatgtgcaggttagttacatatgtatacatgtgccatgctggtgccctgcacccactaactcgtcatctagcattaggtatatctcccaatgctatcccaccccgctccccccaccccacaatagtccccagagtgtgatgttccccttcctgtgtccacctgttctcattgttcaattcccacctatgattgagaatatgcgtgtttggctttttgttcttgccatagtttactgagaatgatgatttccaatttcatccatgtccctacaaaggacatgaactcatcattttttatggctgcatagtattccatggtgtatatgtgccacattttcttaatccagtctatcattgttggacatttgggttggttccaagtctttgctattgtgaataatgcctcaataaaaatacatgtgcatgtgtctttatagcagcatgatttatagtcctttgggtatatacccagtaatgggatggctgggtcaaatggtatttctagttctagatccctgaggaatcgccacactgacttccacaatggttgaactagtttacagtcccaccaacagtgtaaaagtgttcctatttctccacatcctctccagcacctgttgtttcctgactttttaatgattgccattctaactggtgtgagatggtatctcattgtggttttgatttgcatttctctgatggccagtgatggtgagcattttttcatgtgttttttggctgcataaatgtcttcttttgagaagtgtctgttcatgtcctttgcccactttttgatggggttgtttgtttttttcttgtaaatttgtttgaggtcattgtagattctggatattagccctttgtgagatgagtaggttgcgaaaattttctcccattttgtaggttgcctgttcactctaatggtagtttcttttgctgtgcagaagctctttagtttaattagatcccatttgtcaattttgtcttttgttgccattgcttttggtgttttagacatgaagtccttgcccatgcctatgtcctgaatggtaaagcctaggttttcttctagggtttttatggttttaggtctaatgtttaagtctttaatccatcctgaattgatttttgtataaggtgcaaggaagggatccagtttcagctttctacatatggctagccagttttcccagcaccatttattaaatagggaatcctttccccattgcttgtttttgtcaggtttgtcaaagatcagatagttgtagatatgcggcgttatttctgagggctctgttctgttccattgatctatatctctgttttggtaccagtaccatgctgttttggttactgtagccttgtagtatagtttgaagtcaggtagtgtgatgcctccagctttgttcttttggcttaggattgccttggcgatgcgggctcttttttggttccatatgaactttaaagtagttttttccaattctgtgaagaaagtcattggtagcttgatggggatggcattgaatctgtaaattaccttgggcagtatggccattttcacgatattgattcttcctacccatgagcatgaaatgttcttccatttgtttgtatcctcttttatttcctcgagcagtggtttgtagttctccttgaagaggtccttcacatcccttgtaagttgtattcctaggtattttattctctttgaagcaattgtgaatgggagttcactcatgatttggctctctgtttgtctgttgttggtgtataagaatgcttgtgatttttgcacattgattttgtatcctgagactttgctgaagttgcttatcagcttaaggagattttgggctgagacaatggggttttctagatatacaatcatgtcgtctgcaaacagggacaatttgacttcctcttgaatacacctttatttccttctcttgcctaattgccctggccagaacttccaacactatgttgaataggagtggtgagagagggcatccctgtcttgtgccagttttcaaagggaatgcttccagtttttgcccattcagtatgatattggctgtgggtttgtcatagatagctcttattattttgaaatacgtcccatcaatacctaacttattgagagtttttagcatgaagggttgttgaattttgtcagaggccttttctgcatctattgagataatcacgtggtttttgtctttggttctgtttatgtgatggattatgtttactgatttgcgtatgttgaaccagccttgcatcccagggatgaagcccacttgatcatggtggataagctttttgatgtgctgctggattcggtttgccagtattttattgaggatttttgcatcaatgttcatcaaggatattggtctaaaattctcttttttggttgtgtatttgcccggctttggtatcaggatgatgctggcctcataaaatgagttagggaggattccctctttttctattgattggaatagtttcagagggaatggtaccagttcctccttgtacctctggtagaattcggctgtgaatccatctggtcctggactctttttggttggtaagctattgattattgccacaatttcagatcctgttattggtctattcagagattaaacttctgggcggaagcactttctaagtggctacaccatttatatttcccctatggaaatttgagtgtttcagtttctacacatcctcaccaaaacttatcatctttttttattttagccattcttttcggtatgaagtggtatctcattgtggtttttatttgcatgtccttaatgactaatgatgttgagagtcttttcatatgctattggccatttgtttatcttctttggagaaatatttgtcccagtcctttatttatcagatgtattatttgcaaatactttccctcattcattttatggcttttttaactttcttaatggtattcttttttttttttttttttgaaacagggtctcactctgtctcccagggtaaaatgcagtgctgcaatcacagctcacaccaatcttgacctccctgggctcaagcaatactcccacctcggcctcctgagtagctgggactacaggcgcacaccagtatgcccagctaatttttctattttttttgcagagacagggtttcaccatgttgcccagtctagtcttgaacttgtggggtcaagtgatctgcccagctcaggctcccaaagtgttgggattatagacaggagccactgtacctgacctttatttatttatttatttattttggaggcaggttttcacactgctggcatgcagtggcaccagtatggctcactgcagcttcaagctcctgggctgaagcgattctcccaccctagcctcttaagtagctggaactacaggcatgtgccaccatgccaggctaatgtgtttttattttttgtagagacaggtccttgctatgttgcacaggctggccttgaactcctggcctccagcagtcctcccacttccccctcccaaagtgctgggattataggcatgagctaccatgcccagccaatgtattctttgtacatgcaaagtttttaatgttgaagaagtatgatttgtctactttgacttgggttgcttataggtgatctcgattaagagtccaagtaagagactaatatagtaaccttgtagatgatagtgttttaagtgtattttttttttttcttgagacagggtctcgctctgtcacccaggctggagtgcagtggcatgatcttggctcactgcagcctctgcctcctcccaggttcaagcaattctcctgcctcagcctccctagtagctgggattacaggcatgtgccaccacacccagctaatttttgtatttttagtagagacagggtttcaccatgttggccaggctggtctggaaccccttacctcaagtgatctgcctgccttggctttccaaagtgctaggattacctacgtgagccactgtgcccagccacaagagtgatagcagtatgttgatagcagtgaaaacagacatttggacagagttgcaatgtatttttatgaggacaataataataatagcaaacatctttgtatagtgcttattaagtgctaggcactgttctaagtgctgtatgcagtaactcatacccaacaaccctatgaaattggcataattattcctgttttgcaaatgaagaatctcaaggcacagagctggtaattaactttcatatggccatatagcttgtaagtagtagatatatttactgtgatatattgcctctaggtaaagcttatatatggctttatatttatagtactgtttccatgtattttcataatcttctataatattaaactttgtagattgtttcatttcaaattggtattttaaatctaatctgaaaagaaattatatgtgtatgcacaaatgtgtatatgtagttatgtaatatatataaatggatagatatactgtatatttgcattaagagttgcctgaaagaaggatgtgttccaagataatgagaaatagttgtgggatttatgtgtgtgtgatttttttaaaataccaaagttattttctgtatttatgttcattattttattatatatagctatattctaccttgaaaacaaaataaacaaaatatctgcttgctattgaatgtcatttttcttcttttaagcagataatccatattttttaaattaattaatttattttacagattgggggtctcactctgttgcccaagctagagtacagtggcacagtcataactcactgcagcctcataactcctgggcttaagcgatccttctaccttagcctcctgagtagctggagctacaagtgcatcattgcgcctcgcttgctattgaattctttaaagtaccttaaaaataaagtatcttaatttcattggtctcatgttcttaactcatgtcttgtatggatttttcttaagggaagactttctttagtttttcctctctctactgtggagaatctaataacactaactttgaatttcaactgagcaaaagattattcccataaaaagaatgtctttcttctcattgtagatctatattacaaaaaactatattgaattattatattttgaattgcatcaacaaaaattttgtcaaaatttggtttttctcttgttataaacaacaactacatggtacctttgattttgctttcttgtcttcaaggcctaaaatttattatctggtcctttacagaaaaagtttactgaacccagttctaaaaaaaacctccacttctctcatgtccacaaacattttctgtgtcagttctataggattctgaaatgtggccaaccaggagcacatatactttatctcttgctattcacatctgcttagttcctgagtttaaaatattgactagtgagtgtcttaaagaaaaaaatatataaatatgtttgtgtcctaaatttgagagcaggggtttgaatagtgagtggtacctgtacttgtttattatttgttaccacggttgcctaatctgtacatggtaaatgttatttgtcatgatattcatgatatttagtgctgtagaattaaatcagtaatgcgactcgactcctatctagctcttctttttgtgatgagaatatgttaattacaaataacattccataattgaggtccaaaaatcatgcagataatgtcatcaccttattactagttttccatttttacaggtttttttcatttttaataatgtctgaaaaaccgtccagctagttaactaatagcaacagttatattattttacatcttgtggataggcaacttgttatcctctgtaatgttatttaaaggattaaactttccctacttattttgacagctagtatctttagcagtccttctctgctcatttatatatgctgatatgtcttcaaggtcatagagcagaatcacttctctattagcagttttctaaaaaagcattaggtggaattctgtcttcctgccttgatactgttactaacaccacctctatatcctgagtagtctaaaaatgaaagaaagaaactcctttttattgacagaccaggaagtggtcttgattataagtgttttggaaaaagatgttagataacatagttcaatttcactgtggctggaacataaattgctcaatgataaatctaaggatgcctttctttatatagttgactctgtcatgtgaaaatgcatttcatattatgatattaatttcttccggtactatatttcttttctcttacttcttctgtttacacctttgttcgtcctgcttttcccttcctcttgcttttctacgactttcatcctttcttttaataggacccctgatctattcagaaaagtcagttaagctgaacataatcgtaggcaagctacagaggttaaacacttctggaataactatttatctgaaatgctggaattgttgggagttaaatttctcagcttttaggacagtctttaattatatcattaatgtgtcatttggatgtgtcacaatagtcgagattggcaggcatgtggttgaattttgagtttgttcatgtactgatgatgtttgtgtagcagttttctagcaatgaagtatcttgtcttgatacataagactaaaatttcttttttatttaaaagattccaggctctattagaaacttgtactttgatggctacctagagcttttgtttgtggtgcgtttctgaaatatgtagtcttatttgaagacctaatacactgaaaagtgtttctctgaccacttggggacttttacctaattcatgttattataatgaagctaatatgcctcatgcacatagatatgtatatatacagcttttttttaatttttaatttttgtgggtacatagtagttatgtatatttatggagtacttgaaatattttgatacaggcatatagtacataataatcacatcagggtaattggggtatccatcacctcaagcatgtatcctctgtgttacaaacagtccaattacactcttttaattatttaaaaaaattttttgtgggtacatagtaggtagttatatatatttgtagagtacatgaaatgttttgttttatccaggcacagtggctcacgcctgtaatcccagcattttgggaggccaaagtgggcagatcacctgaggtcaggagtttgagaccagcctggccaagatggtgaaaccccatctctactacaaatacaaaaattagatgggcgtggtggtgcatgcctgtaatcccagctatttgggaggctgaggcaggagaatcacttgaacccaggagacagaggttgcagtgagccgagattgcaccactgcactctagcctgggtgacagagtgagactccatctcaaaaaaaaaaaaaaaaaaaaaagttttgttttaatacgggcatacaatgtcaaataagtgcatagtgaagaatggggtacccatctcctcaagcatttatccatttgagttataaacgattcaactgtattctttttttttttttttttttttgagacagagtttcactcttgctgcccaggtgggagtgcagtggcatgatctcagttcactgcaacttctgcctccagggttcaagtgattctcctgcctcagcctccccagtagctggaagtacaggcatgcgccactatgcctggctaattttttgtatttttagtagagacagggtttcaccatattggccaggctggtctcaaactcctgatctcaggtgatccacccgtcttggccttccaaagttctgggattatgggtgtgagctgtcacacctggtcccaattatattctttaagttatttaaaaatatatgattaagttattattgactatagtcaccttattgtgctatcaaatagtaggtcttatttattctatttaaaaatgtagaattaaattattattgactacagtcaccctgttgtgctatcaaataccagatattatccattctttctatttttcgtacccattagccatccctactcccccctcctccctccactaccctttccagcctctcgtaaacatccttctactctctatctccatgagtttattattttgttttattgattgattgattgagatggagtttcgctctgtcgcccagcctggagttcagtggcacgatctcagctcactgcaacctccacctcctgggttcaagagtttcttccacctcagtctcccaagtagctggaattacaggcgcacgccaacacaccaggctaatttttgtatttttagtagaaacagggtttcaccatgttgaccaggctggtcttgaactcctgacctcaagtgatctgcctgccttggcctcccaaactgctgggattacaggcctaagctaccatgcctggccaagttccttgttttacgttttagatcccacaaataagtgagaacatgcaaagtttgtctttctgtaagtggcttatttcacttaacataataacctccagttctgtccatgttgttgcaaatgacaggatattattctttctttttatggctaaatagtactccattgcgtatatataccatattttctttatccattcatctgttgatgggtccttaggttgcttccacatcttggctattgtgaataatgctgcaataaacatgggagtgcagatatctctttgatatactgatttcctttctttcgagtatatacctagcaggggaattgctggatcatacggtagctctagttgtagttttttcaggaacctccaaattgttctccatagtggttgtattaatttacattcccaccaatagtgtatgagggttcccttttctccacatccttgccatcgtttgctattacctgtcttttggataaaagcctttttttaaacttgagggagatgatatctcattgtagttttgattttcatttctgtaatgattattgatgttgagcacatttttgtatacttgtttgccatttgtatgtcttttgagaaaatctattcatatcttttgcccattttaaaataggattgttagattttttcctgttgagttgtttgggctcttttctagttgttaatcccttgtcagatggacagtttataaatattttctcccaatcttcgggttatcactttgtcgattgtttcctttgctgttcaaaatcttttttaacttgacatgatcccatttgtctatttttgctttggctgtctgtgcttgtagggtaatactcaagaaatctttgcccagtttcaatgttcaggagtttcccaaaatgttttcttgcagtagtttcatagttggagatcttagatttaagtttttaatccattttgattttatttatgtgtatggcgagagataggggtctatttttattcttctgcatatgtatatccagttttcccagcactaattattgaagagactatgtttccccaatatatgttattgacgtctttgttgaaaatgagttcactgtaggtatgtagatttgtttcttggttctctgttctgttccattggtgtatgtgtctgtttttatgccagtaccatgctgtttcagttactatacctctgtagtataatttgaagtcaggtaatgtgattcctccaggtttttttttttttttctttttgctcaggatagctttggttattctgggtcttttgtggctctatatacattttaggatttttttttctatttctgtaaagaatgtcataggtattttgatagggattgcattcaatctgtagattgcttagggtagtatagacattttaacaatattgattctaccaatccataaacatggaatatctttctattttcttgtgtcctcttcagtttctttttatcagtgttttgtagtttgcattgtagagatctttcactttttttgttaatcgctagttatttatttgtagctattgtaagtgggattactttgtaaatttctttttcagattgttcacatttggcatgtagaaatgctactgattgttgtatgttgattttgtatcctgcaaccttactgaatttgtttatcagttctgttagttttttggtggagtctttaggtttttctgaatataagatcatatgatctgcaaacgaggctcatttgactttttcttttcgaatttggatgccttttatttcctgtctgattgctctggctaggacttccggtactttgttgaataacagtgattaaagtaggcatccttgtcttgttccatatcttggcagaaaggctttctgtttttccctgttcagtaagatactagctgtgggtccattgtacatggcttttcttctatggaggtattttccttctatactcagttttttaagagtttttattatgaagtaatgttgaatttttatcatatgtatttccagcatcagttgaaatgattatatggtttttatccattattctcttgatagaacatgtcacattgatttgtgtatgttatactgtccttgcatacctgggataaattccacttggttgtgatttttttttttgatgtgttgttgaatttggtttactagtattttgttgaggatttttacatcaatgttcacctggaatattggcctctagtctagtctagtctagtcttgtctggtcttgtcttttcttttctttccttttcttttctttttcttttttttttttttttttttttatgtatgtgtttggttttggtttcagagtaataaaagcattgtggaatgaggttagaagtattccttcctcctctattcttctcaatagttggagtaggattggtattagttcttctttagatatttggtaaaacatctaaaattaagcagtgaagccattggtcctggatttttctttgctgggagacttattacatcttcagtcgcattacttgttactggtttattcaggttttggatattttcatgattcaatcttgttaggttgtacgtgtctgggaatttatccatttcttctagattttccaacatattggcatataattgctcatagtagcctctaatgatcctttgaatttctgtagtatcagtcataatgtctcctttttcatctctgattttatttgagtcttctctctttttttcttagttcagctaatgatttgtcaattttgtttatctttttaaaaaaccaacttttcattttgttaatcttttgtattcttcatttcagttttatttatttctgctttgatctttattatttatcttctactaattttgggattgggttcctcttgcttttctatttctttaagatgcattgttagattgtttatttgaagttttcctttttttttatttaggtgcttataactataaacttccctcttagtactgcttttactgtatccatatatatattttcatgttaagtttcattcacaaatatctttattctactgtgctttttctcttgtctggattttttaaaacactatttgacaattgttttaggtggtggaaaattaatttagtcagtgtagaaaacttaagtatctgtgagctgccttccttttagaggctatgcttaaaaatgcttataacagtatcaaattttccttagctttctttaatttttttctgaaataagtaagtggagatatttttgctcaagttgtcaccagttgactgatattgagataaaggtagtaaattcaatttgctaattcagaaatactggagattctttattcactgtatgataagtgtcatacaaattaactttccctggctcaggtctgtggctcaccacttgttttttgtaaataaagttgtttttttttttttttaacataactgcactcatttacatatgttctatgactgctttgacagtccaagagtagagctgagtaactgcaacagacagtggagcttttacatcctacaaggccatatggcctcttacagaaaaagcttgcagatacatgagccactgcagatacatgaattattgttgttatcagttatgtgtgtgtgttggggggcaaagggcattgagtgttttaagatcttctttctttgcatttcacctctcttcaggatcctgtatccctgactattgaagtaacattctacctaatggagttttgatcaacagtcattgtgaaatgcatctgtagagtaaatttttatttattacctgatcttaggtacatttggtaatgaggcaatcatttatattcatatttggtgatgtgtgatactcttagaaaaatccaagtagtttgagacatttttgtatcttttcttatctcatttctaggtacaggacatctgcttcagccatgactgtcgctgggttgtggtcagtactctccggggtacttcccacgttttccccatcaacccttatggtggccagccttgtgttcgtacacatatgtcaccacgagtagtgaatcgcatgagccgtttccagaaaagtgctggactggaagagattgaacaagaactgacgtctaagcaaggaggtcgctgtagccctgttccaggtctatcaagcagcccttctgggtcacccttgcatggtaattttctctgtctccactgttatcttgaatcttccttccctttgtccttatttttacagatctgggataaaactaaacttgttatagtctgttcatgtaaaaagaagatcttaggcttatatgaaattcttaattattaaataatttaataaattggagccagtatagtaatggtgatctttaccatgctattttaactccctgtttcaatatataagggatatttggtatcatatttatggaatataaaacttggaactatttttataacttcagagaactgaacatcctttttacttatctcttccagaacattctatgttcaatgggacactatagtttattaagaaatattcattgttggaaagaaatagtcatgggtaatgtgtattttagatagagcagcatttgcttttttttttttttgagacggagtcttgcactgtagcctgggctggcatgcaatggcgtgatctcggctgactgcaacctctacctcccaggttcaagcaattctcctgcctcagcctcccgagcagctgggattacaggcatccgccaccacgcctggctgattttcagtatttttagtagagatggggtttcactatgttggccaggcttgtcttgaactcctgaccttgtgatccacctgccttggcctcccaaaatgctgggattacagacatgagccaccgcacccagcctgcattttattttaaaatgggattggcgggatttctgctgtgtatctcagtaatttatcttagagcaagtagctgtgtaaccatcatcccaatcaataaatggaacattattggaatctctcttttgcataccttctccataacattaaaccacaattctcatttttatggtaaccacttctttactttttagaatatttctactcctaagcaagtgtccttaaacactattgtttccattttatgtaaatggaattgtagagtatgtatattttgatatctttggcttctttaacattatatttgtgagattcagttatgttgttgcaggtaggtttagttcatttatttacagctctcatttattccattgtacttctgtttatttatcctttctactactgctgatgtacattgcatggtttcaggtttggggataatatgtatactaatttttgagtggaaattcttgatcataacgtagttgaatcttaaccttgataaataacactggagtggttgtaccgtttcattctcactagaacgacagaaaacgttgacattagatcaccttttctggagcattgcagatttcccttgatgggtgaccattttaggttttcaagattggggaatcttatatagagagattgtggttaccacagaaagtcattgttattttattaattgacctgaaattcacataacgtaatattcaccatgtaaatgtgacagtacattcatgatgttgtgccaccacaacctgtttacaaaacattttcctcactccaaaaggaaaccacatattctttaagcacttactcctcattcttctttctcctaatcccctagcaaacaccactctctgctttgtagactgttacttgtcctgtatattttatataaatataattatagaatatatgaccttttgtttctgccttctttcatttagtataatgtttttgaagttcatccacattgtagtatatattaacacttcactcctttttatgggtaaattatattccattgtaggaatgtaacgcaattgatctgttcattcactgaggtacatttgggttgtttctaccttttggttattgtgaatagtgctattatgaatatgtgtgtacgtgtatttgagtacttctatgtaattcttttgagtatgtacctatcctaatttgtttcagcttctgtactgaccacattacacattctttcgtagtatccgatgacttacacacacacacacacacacacacacacacacacacacacactctgtaggaagcttaaagatagactgaaaaaatataggtaaatgttttcctcgggacttttgtaactcaaaaaaatgggacctctttttactcctgagatcatactttatgctttggttctattatttttaatgagaatgattgttattcatgtgtatttaatttaactagtgacccatgatatttaaggttgaaagtttttagaatcagctctagatgcaaaaggtcattgggagctaaacattgagtatacatggacataaagatgggaatagtagacactggggactcctggagggaggacagtgggagggggtgagggttgaaaaactacctgttgggtactacgctcactacgtgtgacaggatcatttgtacaccaaacctcagggacatgcagtttacccatgtaacaaacttgcacatgtgcccccgaacataaaataaaaattgaaaaacaatgcttatatttcaaaaaagtatatagaatttttataaaataaaatttagaaagctatgagatattgatattttcagctatttgctagacattttatttcagacttagttacattttttggtgttagtgttaaaattgtgttttctatgtagatgtgtagtataggttctttgggggcttttctttttgtgtcaaatgtttttcataacataaaattttagcaaaatcttttggcaaagagattcactgtacacatggagcagctaggtcaataagagaaaccacagatgtattagtaaattaagaaggctttgtgatccctacatttatatgtctttggaagatatttccttgagcttcttttttgttcttattcttgcttctttatacagcaaaccacataagaggtttttgtgttaagattcaagcataatgtgcacaaaagattgtgggcattcctaccctcatagatcttgtattccacgggaaaagacagatattaaatgactgtgaacaaatacctttcaatatacttttgttgaaggttgcaaagtgccagtcaatgaaggatttcatcatttgtgaaaggacagtagttaaagagcaatactactagatttccaagtcaaaatatattgttttctctcagctttattgctttcatgtctctctgcatgtttttttcagaaatctcaaagaggagaatccacactgttcgactatgctgctgtacttaagattttcttttgaaagcaaggaatttcaggcagcctattcctcctgatagataacacgtgttaaaattttatttccagaatttccgtctattactctgtgtagtttttctcatttttgaagcatggactttagagtgatggtcatttttcttcatgtttttttgtatcttacatgtcataacaaaatgggcattgttggttagttctaaaaatgatgtatttacagtttgtgtgggtaaacagtctgatgctggtcaaaaacaatgtaaaccattgaacagggagggattcatcttgaaaatgaatcatgttttggcggtattaccgttgtttgtctgtgctctttttagccaagtaaaggaaactgttaaataacagttgatataggggtatttcctttttactctttggacccaatccagtttaggttaggattattttatctatttgccaatttttttaactttccagaggatgtttatttatttgaaatatattctttataaatatctcttccatttcctatcttgttgcctgaacatccacttagtctacttgaggacttcttgtgatccatgaacaggataggaaaaaaatttacatctttatattcactatcctttaaccaaaagtaagcatttcctttttgttatgaacatggaaaatacatgacaaaaacattaacagtgcttgtgacactgttaccaatagaaaatgcagaattactcatatcactttatatatgaaatatatatcttgaagtatcttgcattattgaatatattttaaaatattgtttttactcatcactactttgaaattatgattatataatattttagtattaattgattatatacattactataacactttatttttaatatattgataactgtacttcagtatagttcattttctttgtaattatatgtctttttcccatggcttgtaagtattattctgggaaacattcctcaggcttccccagactgtccaaatagtctgtgatacaaaaatggttaagaatccctgatcatcattttttccctcatctatatcagtaatttctaacaattttttactatcacaagcacttccttgtggaatgttagctataaatatgatctgccaattttctgcttaagatctttgtgtctcaccatattcctagaaggttagaaaatgtcctatcttatttccagcttcttgtctaaccatacctagatttctgtacccttccctgaatatgccacatgtatttattttttgataactttcctatttgcaacttttctttatttgacattattattgcctctttgaatgcctactaagcaagctaaaatattactgcctctcttaagccttcttttgatttttatcatctttttcaaccttggtattggtatgctctgcatacttttatcatattataatatgcaggttattcattgacatgtctgggcttcctattagattgacttctgtgagcacaaagtctttttggtgtttctatttgtatcttggcagttgacatagattctaaggccttttttatttttttgagacggggtctcgctctgtcacccaggctggagtgcagtggcgccatctcggctcactgcaagctccgcctcctgggttcaagcgattctcctgcttcagcctcctgagtagctgggattacaggtgcgtgccaccatgcccagctaattctattctattcttttcttttcttttagacggagtcttgctctgtctcccaggctagagtgcagtggtgcaatcttggcttgctgcaacctccacctcccgggttcaagtgattcttctgcttcagcctcccaagtagctgggattacaggtgcccgccaccatgcctggctaatttttgtatatttagtggagacaaggtttcactctgttggccaggctggtcttgaactcctgacctcaccgtgagtgagtgatctgcccaccgtggcctcccaaagtgctgggattacagacatgagccaccgcgcccagccgaatttttgtattttaagtagagactgggtttcacaatgttggccaggctggtctcaaactcctgacctcaagtgatccacctgcctcagcctcccaaggtgctgggattacaagcgtgaaccaccgcgcccgaccagtttctaaggctttaaaccagagttttaaaacatctttagaagttgttctaagaaaaacaatttagatttaaataattacttgttagaatgaagagctttttattcatagtaacaacttaaaaaaacatctccaaggtgtagtcatttgatcaacaacattaattagtgtttattgtgtccaggcactgttctgagtttaggaatttagcagtgaacaaaagagaaacatgtctgtgttcccatggagccacagagaaaaatgagggaaggggaatagggaatgcctagggaggattgcaatttgaaattagtatgcttcccataggccttgctgagatgatgacatctgagcaaagatctggtggaagtaagagagaaattcatatagaacagcctgtgtaaaatcctgaggtgggagtgtgcctggcatgttcaaggaatgataaagagaccagtgtggctgaagcacatggtgtaaggtgtataataggtgatgagatcggagaggtaatgagggcagatgattgttagcctttcactcagcatgagatggaggggggctctggagggcattgagaataagagtgacatgataatactgtgttttggcaggactagaatggagatctgtattgagaacacagtctgtacgtggacatgggtggaaacttagttgagaccagttaggagagtattgcaaaaaatcaggcaagaaaagatgaggtttggagtaagttgtttatagtgaagactgtgagaagtcattggattcttgatatattttttatggtatggcgatcagaatttctggtacattttatgtcaagtatgaaagaagagatgagtcaagatgactagtaagacttttaacctaaacatctagaaggatagggttggtgtcaattgaaatgaagaatgttgtggataaagcaggttttgggatggggacaggatcaggaattttggacatgttaagtttaatatgatgtctttttgacctcctactgatggtaagtaggtagttggttacatgagtctggagttcagtggaaagcagtcatttatgtagggataaatgtttgcaatgcatagatggtagctgaaacaaaaatgagatgagatcaccttgtaggtaagtgagtataaaaaagagatgtcccaggactgagccctggggccctctgacattaagtagccagtgacatacaaagcaaaactatatatgagaaatcctagaggccaagtgaattaattcttttagagagaagggaatgattaatgtgttaaattctactgacagatcaatgaagaactgagaaaaataagactattaaaattagtaatgtagaagtgtgatccccaacctttttggcaccaaggaccggttttgtggaagacagtttttccatgggccagtgtggggaggggtgggaggttttgggattaaacggttccatctgagatcaccgggcatgaattagattctcataaggagtgtgcaacctagatctttgcatgtgtagttcacaacagggtctgtgctctgatgagaatctaatgctgctgctgatctgacaggaggtgagctcaggtggtaatgccagcttgacagccacttacctcctgctctgcagcctggtttcgtacaggccacagaccggtaccagtccaccacctgggagttgggaaccccttgtgtaaaagacatatgtctttgataagaatacttttggtggcatggtaagttcctggtcccagtggattttagtaagaataggaaaagacagtgtcgacaagtctttcagggaggattgatgtaaggggaagcaggaacatttagaggagacagaggatgttgcttcttttatcataaggaaatgggtagtgaggatgggtgcaggtattggagctttgaggagaaaggcaaaggtaagaaatagtcctctaggagaataggcattcctttcaccagttagtaaatttttgttgaatgaataaagcatatcttccaccgttatttgtgccctaagtaaatttaattacatatctttgctttccagcttcaataccatgtttctacacctaagttactttctccctacttcttcaggtacacattcaaccccatctttaaaggccagcttgtgatgtactttctctctctaaaaatagtgttgaatttcatatatttgctccttctgtaaaccctttatctgtactgattgttttccactttctgcctattattattggtttttaaattttagattaagagtgtacatgtgcagattcgttacatgggtatattgcatgatgctgaggttggacttccattgattccgtcacccacatagtgaacatagtacccaactggtggtttttcaacctccccacccttttcctccccacttttgaatccctaatgtctattgttcccatctttgtgtctgtatacacccaatgtttagctcccacttataagtgaaaacatgacatatttggttttctgtttctgtgttaatttacttaggataacgacctccagcagcacctatgttgctgcaaaggacacgattttattctttttttatggctgcatagtattccgtcgtacatatgtagcacatttaaacaatctaatccaccattgataggcactttggttgattgcatgtctttgctattgtgaatagaactgcgatgaacatataagtgcatgtgttttttttgtaagaatgatttattttcttttgggcatatacccagtagtgggatttctgtgtcagatggtaattctatttttagttctttatggaatctccaaattgctttccacagggactgaactagtttccatttccaccaacagtgcataagtattctattttctctgcagcctcaccaacatctgttgttttttgactttttactaatagccattctgactggtgtgagatggtaccttattgtagcatctgtctgatgattagtgataagcatttttatatgtgtattggccattgtatgtcttcttttgagaagtgtctgttcatgtctaaatgacccttttaatggggtcatttgttttttgcttgctgatttaaacttcttatagatttgggatattagtcctttgttcagatacatagtttgtagtatttttttcccattctgtagattgtctgtttactctgttgatagtcagaagctctttagtttaattaggtcccagttgtcaattttttttgttgcatttgcttttgagggcttagtcataaattctttgctcaagccagtgtccagaagagtttttcctgggttttcttctagaatttttatagtttcaggtcttacatttaagtctctaatccatcttgagttaatttttgtatgtggtgagtaggtaggagcctagcttaattcttctgtgtgtatatagttagccagtttctccacatcatttattgaatagttatatcctttccccattgtttatttttgtcgactttgtcgaagaatatcaggtggttgtaggagtgcagctttatttcagagttctctgttcttttccattggtctatgtgtcttatttttgcaccaatactatcctgtttttgttaccatagccttgtagtacagtttgaaatgtgatgtctcaggtcaggcgcggtggctcacgcctgtaatcccagcactttgggagatgaaggcggatggatcatgaggtcagaagttcgagaccagcctggccaacgtggtgaaaccccgtctctactaaagagacaaaaaaaattagctgggtgtggtggtgtgcacctgtaatcccagctactcaggaggctgaggcaggagaatcacctgaacccgcgagctgaatgttgcagtgagctgaatgttgcagtgagccattgcactccagcctgggcgacagggtgagactgtgtctcaaaaaaaaaaaaaaaaaagaaaaagaaaaagaaatgtgatgtcttaggctttgttcttttggcttaggattgctttggctatttgggctcttttttgattccacatgaattttagaatagttttttctaattctgtgaaaagatgacattagtaatttggtaggaatagtattgaatctttagattactttgggtgataatggacattttaacaatattgattcttccaatccatgggcatggaatgcttttccatttgctggtgtcatgtgtgatttctttcagcagtgttttgtagttgtccttgtagaggtctttcaccttcttgcttagacgtatttctaggtattttatggatttttttgtggcttttcttaaagggattgcgttctttatttggttttcagcttgaatattattgttgtctagaaatgctactgatttttgtatcctgaaactttactgaagtaatttatcaggttaaggagtctttagagttttctaggtatagaatcatattgttggtaaagagagataatttgactttctcttttcccatttaatgccttttatttatttctgttacctaatcacttcagctatgacttatagtagtactatgttgaataggagtggtgagagtagacatctttgtcttgttccagttcttgaggaggaatacttccagcttctgcccattcagtatgatgttggctatgagtttgttgtagatgactcttactattttgagtctacttttatttttgatgctactgattactaagttaaaactttcttggtgaggaaattggaggacctggaatcagacttcctggtggtagaatctatcttccatgatttcctaactctgtaatcttagacaaattatttattctatctgtacctcacttttctttctgtaaaattggaataataatattaccaatcttatagagtaactatgagaatcagagccctttaaatagtgtttggcacatatcaaatattcagtagaggattactgtagtttctatcattagtatcattattgatactgctgttaatgtgagagtctatagaactgattcatttttcgtattttggtacagtacctgttatccagaaaacagaataaatgagtaattcactaaataatgagtaaattaaatataataattgtgaacttattctttaaaggcttttagaacaatactaggctcaatgttgataagctcagttgctacattgctacaccaatgcaaaaccaaaagtgatggtagtattatcattttaattggtttttgctcattttaattgtatacatcaggaaatatggttttataaatcagtacacctattcttgagcctttgccatttcttaattttgcaaattagttttccattttaggttcaaaaatatagagttcactgtgtcatgggacttagaaggaatttgttttcttcctgcaatttccattgagttaacaaacagatcttggattcacttctgcagttctctagagttcctgcaagtgtctcctttcctattaacttgttcgtcctcagaggggtcatctttgagtcacagcttttggcatctgaattctagattctgctttttctaaatggaagtagttgatgagactcggagacctttgtacaaagcctctcatttcttggacttggagcctccatatttcagtaaagtgcttttacaaaactggaagtatcacttttctttttagcatctgtatgaggcattccttttaccactcaaagactctgtttatagctttcatttgatggtttattgtaattttaacttacgttgatcagtagttttcttgatacagaccacatcacaattgtaaatacaaagcaaccacacatttcagccttatatagtttcacctacttaagagaatcaatgataatgtgatgtttcttgacttttctttccacatcactgtttacttgtggattgaagtttccatgtgcatgttttaatttttgccaagaaaaatcaatcaagtgcactgtagctctgctttagattttatgcctcatatgacatagagtatataaatagtataaacatgttaaatggagaaaaatcttgtggggggatatcttagtttagtacctggatttttattgattatgtgtactttattgttttagctcaaatgcagttttgtttttcatttgttattttcagatttaaagttttcctggtgaatttgttttctcaaattcttttatcaccttttttaaaaaaaaatgttgctatagcactctgctagttttaacatttactattttctcaagacagagcagatgagtttgttagggaaagtggatagaaaagagtgacctcataataccttcctgaaaacaagatgctttcatttcagaatcattaatggaagaagctattaaatgaagattgtacagttgttgtttttaaataggtttttaaagagaagttttaggttctcagtaaaattgagagaaaggtatagataacgtagttttggggggaaataaaattgccagtgggatatattttaaaggaaacctgatattatattgcctctaaattatactttaaaatttagtgctatgaaaattaatttaaaaatattttaaacctaaataaactctatgtagatattttatatttttgtgtatttcattttggatataacacatttcttttctctgtaagttttgcctttaaataaatgccagatgatgtagttatcccttgaaactaatccagaatttcttctttgctttttactgcttgtggaaatattttttcttttctatgtattttttacatgggcaaatcataaactccagatttcaaaatagttttatttttaaatggttaatgagacatgcctctagagggcaatattttctcattgtaatcaaggcaaccctggcatgaacctgaggtactagggatgttaatgtcttatcagatcttaaatagcctttcttcctttttattatgttttctgtgatttattcttcaacgtcttcttagagaattcaactttggaaatatattactatcaattaatatcctttctgagtactacatgcagatccagttcctctgagtgaataccattgaatgaatagaggcaaattttttagttatatcatttgagtatgtggggtcattatgctaaatgtttttttattctctatgtgttgctattcagggacttgttatctgtatactttataatatcagagtgattaaacttcatttttgaggcattgaggcattataagggctaatagttatctactcttttctattaacattgattggacacttactgttgttgtttaccctttaaatataatttttattttttatcaaagaaatacatgcatttattataaaagtcaaaaatataattttatagtgaaaggaggcactttttggcctatcctccccactctcgggtgtcattccccagaggcctcttcttttaactcttctgtttttttctcagttggttttttttgggccctttcctggaaatcctattacttgaataatgtatcttctacattgagcccctaatcttcttgtctattttctatcttttttttaactttatgagaatttccccaacgtatgtttcagtcttcttgttgcatttttatttctgcaatctttttaatatgattttctttgaattttttttattatcacacccttttcttattttatgtgtaatatttttctctctttaagagatcgttataaattttgaagcttttttgtgctccttttattatgccctcccctcccctcccctcccctcccctccccttcccttcccttctttttctttccttttttttctttcctttcttgtctccctttctttgcctttttaaatcgagacaaggttttgccattttgcacaatctggtctcgatctcctggtctcaagcaatctgcctgcctcagcctcccaaaatgctggggattacaggtgtgagccaccaagcccatctggagcagtgattttcaacccttgactgtccattatacttaagctagatagatttgaaaaatactgaggcctagactccatcagactgattgaaccaaaacactgacctcagtgatggggaatccttgatggatcattggctgattatttttatttttacattctattatttaataattcatttttattttattcatttttattcagctaatcaacaaatcaatactaaggaactgattggaagctttttgaatgtgggaagggcataccgccttataggtatcagtggtctatcaggtaggaatgccattttattatcatacctcaaatagtcactatccgtaggtcttttcatgtacgctggtcagttttcccacaaagaaattcttctatcctctgttcagggtggggttggggtaataaagagtttctggcaataaacttagaagttagttttcaaggagttgaaggagttaacattatttttgtctagtgattagaataacaaaaagaggatttggagaacctgtttgcatttgattattgtcttacttccctagttaggaggacagttaagtaagaaattctggtctggttccactgaaataaaaatatttctatggaaatctggagatggaatttttagttgctgaagtgaatgaatgtaaaaactacttattcagataaagaagtgcaaatgggtagaacaacaaattttgggaaaagaagtgaatgttcatttccttatgtacttatcaaaaggaagatctgaaatgttttttttttttaatttggagaaaaattggagagggagaagagagtgagtaggcttcttaggatttgtagtagccagagtttgaatgattgacccatatgaacagatttagaaattatcagacttgagaataacagacatgaatagtcttgaggttgaaatctgagcaggaactagaaatctgctagttgatagttgtaaactacaaaaggacaacaagacagggatcagggctataccaggattatgcacagaagtagaaattttgatggttcttaccatgatgaggtaaatgatattttgaatttggaggaggatgagaaaaggaaaaggatttaaggttcattgaaagagttattaacattggatgatgtgtttttgcaggtgagaatattgaagctagaatgaggcacaagagggaaattactatttcagaatggaccaaggtggaattaacatgggcactgttgttgttggcttcagaagaaatagagcattccattttctgtgttaagagccatctctagtaaggaatgcttaattaatgttcaataatatttcactctggtctagttttggagcagattgaaatgtgtctatatttgataaaaccatagatgagggaaaaaataccatgacagtactcataaatgaatatagttttccggcagtgctccagctgattaggaaagtgtttcggcttgacagggaattacagggaaagaagagtcattatttctcaactggggatggtcgtggtatcactcctctttgtggttcttactgtcaaggatcttttgtaaaagtaggttttacgtacgtaggtaaagtcataggcatacttttggaaaagtaaatttagaagagaagggcttgaactattagtattcgtgtggtgtgcttagtttgatttttttctttttctttttttttggtaaactgttccacaaattgttgataatttaggcagctaaatggagtattggtttcctgttttcatcttgaggaaaatatgtaagcatattttgatagatatttaaatgttttaaaactggaaataaagtatatgtgaatagaaaaggttttatctgccctgttgtcaaaaatgctgatttggccctttcgtactgtactcccatctttgtatggttgttacaatctgttgctctttcccatctgaaggaaatgcatctttgacacttctcatgacctgcgtcatgatgctgaaatagagccagaaaatatccttaacagtcatgggtaaaaagaaggaaggcgtccgtgggttggggcgggagaataggggactgtgaggagaagagagtctttgctctttcagtttacatcattttgatttttaggaaagttacttacattttgtggctatactttttttttttttaggaaaaaatttcttttttttcttttttttttcttttattattatactttaagttttagggtacatgtgcacattgtgcaggttagttacatatgtatacatgtgccatgctggtgggctgcacccactaacttgtcatctagcattaggtatatctcccagtgctatccctcccccttccccccactccaccacagtccccagagtgtgatgttccctttcctgtgtccatgtgatctcattgttcaattcccacctatgagtgagaatatgcggtgtttggttttttgttcttgcgatagtttactgagaatgatgatttccaatttcatccatgtccctacaaaggacatgaactcatcatttttcatggctgcatagtattccatggtgtatatgtgttgtggctatactttttattcaagagaaaatgcttcgattttatattaaattgttccttaagtatacattctttaatgtataggtatacaaagtacataaagataagttctgcaaatgtaaaattaaatagttttgagttctccagatctaagaaaatacactttaaatcttgcagttaattctatatttcatcttcctacaaagtgtttatctcagaaccaacttctgatacttctacatcttgtatgtttagcagtttaagtaataaagtcacatttgttgaaacaagaagataggattctatattttttccatctacagtaaagcatttctatttactctgttgatatacaaaattcattgtgaggtaaagatgggagagttgagtatagggtattttcaagaaataatttaatgaggacttatactttggggagcacatttcacctcagacttgttctaagggatgttagattatggagccttaattcagggatttttcattaggctaaaactccacttttgagcacttagtgtcagtactatatttgaacttgattcagaggagtgggaaattttgagggtgctttaatatgatacatttagaaataggttgaggcttaaggtcaaagatctttttaaaaaatttttatttatacgtatgaagaatttactttcttccctcttgtgttaaatatagtctttttactgttatatttgatttttcattgttgaaggagtgtcaaactacaatcctaatacgtaaaatgaattaaaaattgctaaaccttcttaaattttaagagcaccaactcttaataaactttcttcattccaaaatcttggagtgctctaagaataataagtaatgaacttaccactttgagggaggagattttgttcatttaacttacaagtttgggttgactctgtgattgaaacttaattgcatgaaacttttcagacagattttttatatttcagtagaattcctcacagctagttctattatttttccctttgtgttcttgcattttataaacattgtttctaactgttgatttcatctccttttctagggaatttttgcctcctaagttttcaatattccttgttctaggcccaccttgttaccttttggagttgtgtcaactatacttgctgtacttagaattttagcaacaggaattatttctttatgacttttaatttttaggcatcaaatttctaaatttattgggtttattttagctttaagaaaagaaaaatacttaaatttgtatgttgtagtagccaacacattcagataataattaacagatgataatggattcacaatagaaaaggaaaactacctagcaaattatttattggagtattcgtacataaatatatacagtttcaattctcctgaaagtacacttttaattctagtgacatttaataagccctaggcaaagctccatgcaggctactttgtatgtagtggggagaagtgatgacactatcattaataatctcaatccccatcctgtttaaaaaaaaaaaagaaagattggattcttgttttcaagtccattttgtgggagatttctctaatcttcctaccttctcaccctttctcaaagtacctacagtaatgtctatggtgacgtgaactttttactcaaagaaagcaacaagtgtttttgcttgaaatgcatcaaaaattgcagtgtttttacttcaccatcgattgcctccaaaaaaaagttataggcaaaatgaatcagtgcccacacaggattgtccttcagtattttctgtctttatttgtcacccaaactgtttgttgtgtttatagtctttaaaaatgtgtgtctgtgtgtcgacacacacacacacacacacacataaaattcattttcttttagtgtgtgttctactctccttggctcctgtgaacaagcattgcttccgcccagtttggtatgtgggtcagaaggcactgtttctcaccagggtgctgctgtttccttttccgacttgagtagattgcagattatactggaacatgcctgagaaaaggtcataaaggagggtgaaagtcctggaactgcagctgggaagcttgacattctcatctaggaaaggggagaagagagagatggagagagagacacacactcccatcccaaccaaaaataacccacctgcaggaaattcccttctacacagggtattttttgttaaataactattgagagtttggttgaaaaaactttaatgttaaattggatggcaagcaagaactaagcagtgtttttaacttttcagagcccacatttccagtgactatttcaaaacaagctaccattgtattctttgacagagtcaagaagtcagagcttttcaactacagaattaacttagttaaactccttggtatattttagatttttatccctgtcaattccacagcaagatattaaaaacagtccaaaagctttgctcttctgtagaagacaaaagtttaccaaaaaataaaaaataaaaaaataaaaaaaaaggccccgtagaactcatcatctagtttttatttttgaaagatatgatatagggaatagaacatctacatgatgtcttagaataggtaaagtgttgcaaagagggcaaaaataaaggagatatttgggactggggctgtttccgtagaattgtcttctgaggagtgccagagagtcacattgacctcgggcttcagtgtggctcagtaatccgatttcaaaatgcaagagttccaaataggagaccaaagacactaggtgaggagcttatatcctagaacaatagtgggtgttgtagataagtgtatggagaggtgatgagaacagaatttaatacagtcgtaggagtctagagtactgagttataggaaggtgtctattgtaaaccttcagaaaagtggagtgcctaaagtggataaggtctgtgtctgtggtaagaataagtgggatgatatgtggacctcctaataacactgctctttcacagggcaccattgcttagtgtcctttagctctttttgcaaatgaagctttgccgtttctatacttatctctaatactctaatactatacttacctcatatgtctaatgacaacagaaggacagtgctctttttatcctccaaatgtttcacttgacccactttattccattgtaggtcttagtttctcataccttctgttcctaaagaatctttctttgtcctccattaacaataacttttagaaacctgtaacaaaaatttctctctctctctggtatgacactcctttaaggtactttctgatctacaactattgtcatttgattccttaatgttattttaactgattttatgtcctttggttcacaatatggtaagatatggaaattttttaaaggtagaaaggatgcaaatacattcattttttattttccctcttcttgtttgtatctcggaagaaagacaactatacatatgtacacacagatacactgatagtaactttaatatttaacataatctgaaatgttcaacaatttcagttttgctagcttcagagagttcttgcagttggcagtttgccacattcacatgttctcacatcactgcattcagaagctaagaataccaacctggcagcttctgcacagagggtaaagataaaacagaagggagtctaactttgcagccacattacctgggagttgctgctgatgtcttttccacaaatgtccaagtttgtcaaagcccagtaaatcttagaaagtttattttccttgtagcatctgtgttttataatgggtcttttaatttgtttttactttgtctgcagggatttcttttgtccggagttttcagactctgtcttttttttttttttttttttcctgtggaagtgagtctgttaatgatgactggtttgggaatatgcctctctgcaaagctgacctgacaagctattcctccagcgtggcaacaaagcccattgttattttctctgttcacttttatcctcaacttaatccatttttcttctgtgtttttatagtatagaatgtctgggaaaacataatttaggacaaagcataagtaagatggtattttgaagttagcaaaacttttagtaaacagatcacaccatgtcattctcatatatgcagacagtggaactatgtgttagtatggagattgagagtttgtgtcccccaaagtacacgtacctgtagatatcctttatccaaaaggtaacaggaaaaaaagagcacaagaagttgttttcataattcctttttttttttaaattgcaaacttttagaagataaacatagaaagtcagtggttgaacccgaaagtgaatggttctggtgtaatggctttgtattgtaatattaaaaacaataatagcagtaaacaaaaaactgaaagcagaacaaaaacaagacatcatagctttaaacatcaagggatgttttaaaaattctgatttttaaataattttgtatccccaaatagaattcctgctttaacttattgagaaaccattttattggaactcgggatttctttcccccaagagaactccatctatcgtggggactggtaaacctctaaaggatcaaagctctagtggatttggataaagacccaaaagcctgaggcttatgcaagtttatctatatagagtaagcccaaaaaactgggatgagagtcttagatgagcttattttctcatgagatttttgggacttcctctgtctgcttgtgccagaaatactgtgagaatattcattctcatggcatttgtcacttacaggtctcctcttagctggaatttgaaagtataatagtgtgtgaaatattttatgtatctcaagacttcatgcagtccactaccaaaactgcacttaaataacctctgttctttttcattgtactcatgcaataaaggaaaaaatagaagagtatagtaaagaaaggttagtgaaggtgataccttgtaactctcttcatagatctcagaaatattatttgtatcttatgtatttctgagaggtgaagcaaagaaaaagaatagcaatagacttcatctaggtccaaggcagacactgcaggtttcttcctgctgaacttccttatacgaagaggcttgaggtttaatgaagaattctggcttgaaaatttaggcttgatataaccacatggaaatgtctaaagatctatttttaaagttatcaagtctaaccttctaggccagtgaacgtgagactaagcagaatagtgaaagccgcagactccagtcatctggcaaccttctgaagtactgagtcccctccagaattattttttctatagatcatagggccgtatttttctctacctcctggacatggaaataaatatatttccttcattcattcagcaaacatttattgagctgttagctattaatgactagtaagacactatcctcaggagtataggcagcctggtggagtctccagtattgtggaggacaaatctggaggtttgttagattctagctgaattttcaaagaaaatccaagacagtgtaaatagtgtaaaatcatttataaccaaagattttaacaataggtcctggaagaaaggattgttaggctgtcttgtgtagttattgcatttatttatttaatgtgtattatttacatgtctgtgtcagctattgagatttctggtctaagctagctctttcattttactaacttctgatgttatttatacatttctcctgctttattttctactagaaaagcaaaataaaaagatagagattccttcctttatgctcaaaatttgtataccttttctccctttttaagttgtcctttaaaacaataataaaagtgactccttactttttgttcctgagtcatttttcagatgtatttattagcatggttttctcccatttttcattttttgttaatatgtctttctgtaacattacattatgaactctttgaaagtcccttggacttactccttcagaatctagaacagggcctgataccaataagcctccaaaagtgtgaagtgacagagcaaagattgagtggaacttttgcttggcgcagtatgcatctttgttaatgtcttctttttcagtgtcagtctttaaatctttgttctctgttaccttgattttatcctatcagcagttcctttgcttatggcttacaatctgacttttccacctcactgctgaaactaccctactgaagactattagagttagctttttctctgagtttgtcttcttagatcttggccttattgagcattttattaatatactcattgtttcattaaaactgtgtttataagttgctagccatatccattaatatgtaagacagacaccacccctacgaacataaacatgaatgtaaaacctacacaacttactttgctctctcagatgtgctggtttcaaatggactctacagcataaacacaggagcaggctgagaaggatagatctgaagttctttgtatgctattctgaggttgtcctttatcctggtgagacagtgaagcattttaagttgtgcctagctaaaccacagatttggaacttctcagtgaatcacttcattttcctagaccactccttttatctgtcaaattcaatgacttcaacatctatactgttccctcgctgaagaacttaacctaagttcctactcctctggctcaattgagaggtcctcctaaaactgaaatattttatctgccatagttagagattcctcactactcctcacataatggcatccctttataccactctcccctcacgttatccttcatgcccagaatattccttctctcctacccttatccatattttgtccaattttcaaaatctagatcatatcccatttgcccttttccttgagcccttttccatataaagttgttcccacgtctgcttatctttggttcttggcaattagcacttaatgattcctgtttgtgcctgttagactgtaagcttcatgataacaaggaaaacagtcccttacagtgttatcttaagctaaggcactcaacaaatatttgtttactagttgtgaaatacatatgatgtacacaattcttaattttcaccagcttgtgacagaaagttgcagtctgatttcaaattcaagttaatattagcatagttgtctaatagcgattttataattatttacatctatattggccttgagagtgtgataataaattacttcgaatggcttaactatgaagcagtttttctcatttcttccacaaatataatattttaatgtgatttccctcttcatattttctacaaggttctgtgttgtggcctaaatcatcttgtgtgtattgtgaattctgtcttttgttattcctgcaacaggtgtagatggcttctgttaactttaatgtgtattctgaattggaaattgaggagatagagaacgatttattttatttgcatgaatttcttatctttccccatattttacaaaagagacatttatcaaaggttaacttgatagttctatagagtaatataaaaggatagatttgtgtccaaggaagaagtaacatttggttaagccactatcctaattctgaagccactgtcatcttgttacgattttttagaaaggcacttttgacttttcactacctctcaggctaccattagatactgtgtggtagttctccctctatcctgaatccatgctatttttaaagcaaatgtcttttaggatgtgttttagaaataagatattaattaggactttcgggggggatgcttttgctgtgtacataaattggtcaacttaattcgaattagtaaaaaaaatttatatgtgtgtttactgtggttatttaaaaaataccttatctattgctaaccacataaatggggttgataatttttatcgacagtcaagaacagtgatataaaattaacattaagtcaataagaagttttttgcatgaaagagttgttggattacaggcactggcttattccgtaacacagaaaatgaggtaatttttatagtttctctgtaaacccatcaattaataagactcactagaaaactacagtaattgagaaaatgtggtattggtgaaaggctacacacatagatcaatggaacacatggatcaatgcaggaatagaaccacatgtatatggtcagttggtttttgacaaacatggaaaggcaattaaaggagaaaggataatctttttagcaaatggtgatggaacaattacacttctatattaaaaaaatgaatacaatgaacctcagctctcactacatacacaaaaatgaactaaaaataaatcacagtttgcttttcccctgtcaaatcaacattgcactggaagttctaggtaggtcagtgaggaggaaaaaaaaaaagggcatctagactggaaaggcagaagtaaaactatctgttttttgaggatgacataattatgtatgtagaaaatccttaggaatccagaagacattattagaactaagaaaggagctcagcaaagttgtaggatacaagatcaatgtacaaaagttacctgtatttctatacattaacaatgaataatctgaaaaatgaaattaagaaaacaattccattttcaaattgcatgaaaaagaatgaaataattagtagtaagttaaccaaagaagtacaaaacttgtaccctgaaaactacaaaacaacattgaaagaaatttaagaatacctaggtaaatggaaaggcatcctaagttcttggattaaaaggtatattattgttaaaatggcagtattccacaaattgatctccagattaaatgtaatccctatcaaaaactcagctggcttttgtttagaaattgacaaggtatgggggaactagcagattgtgttggatgtaaggacctaagcagggcaacaaaccactttaactgtctttagaaagattaggaattcagccctaattcccaaagactgaaatatgttaataattaagtcacacttggtgttaccagaatacttcttttttgtttgtttgtttagagacagggtctctctaatgccacctgggcttggagtgcaggggtgctatcatagctcactgtaaccttgaatttctggactcaagtaatcctcttgtctcagtctttagtagctaggatgacaagcgtgtaccacaatactcagctaatttttgatattttttgtagagatggggtctcactctgttgcccaggctggcctcaaactcctggcctcctgccttggcctcccaaggtgctgggattacagtcatgagctatccagctctccaagaatagtttggtttcttctcatccacataattgtaattctcttggcatcaattctacctttgatgcctttcttaaatgattactggagtcagtgaaaaccctatcggagatagagaacgggagatagagaaccttcctcagtgatgcttttctttatttttctctttgtagggaaactgaacagccaagactcctataacaattttaccaacaacaaccctggcaaccctcggctctctcctcttcccagcttgatggtagtgatgcctcttgcacaaatcaagcagccaatgacattggggaccatcaccaaacgaaccgggtaaggccttagacttgatgcttttttaacagctgttttatagggttgaatgaataaaaataaaacatactttttctttgtgtggtttttattatgttcttcatttccagctcaaataagacttaatggcatcagattaagtacaaagcatagaacttgcacaagcatacttgcacacaaccatgtatacacacattcatcgagaaaaacaaaacagtgacaagctgtgaaaactagtattggctaatcaaaaacagatccatctacttcgtcttatgcttactgccttgtggctttgcctgcaagtacagtttcattttcctggctctttcgggatttgaaatgactcccaaattttgacagatacaaatatggagagaaccttagatgacaaccatctttttagtactttgaaaaaatcatctatattgagatataatttacatataataatctgtcattagtgtcaggacaatgtgatgtcattggtagttttcaaagccagtgcactaagatttgggctttatttaagattggtcattaacttccttaaagacttttgattactcacttgatttatttgtgcttattttagcaatttgctaccccttaggaatataagattatcacttcaataggttcctgaaaataaactgctaggtctatgatatcattagatattcaattgtatattaacactggaaatccattttatatcagaaaatatatgtctataggcaaattatttgttttccataatgagcaatcctgaagtttaatctaatttgaaatgaaacaacttttttacatttctgtattaaagtagtcaagagaaaaccctgtctggcctcaaacagtcctcaagttctttccaatgaaaggaatatattatttggctgctacgtcaatatatcttaattttgttgtgctcagtattaatgtgcttacagaggtcacttttgtgagaagaaatactcagtagtctcagggacaaggcctttgagctccaggtatcaccacaacatagaaattgactctgtagctaggtggagtggtgtttgtatataaaaagatcctgttgctgcatgcagacataaaattgagtctgtggcatttgctgtgtttttcagcaaaacttcatcccaaatcagacatcttaaggcaccaataatttggtctgtatatctttttaatttttttcagctttttaactccttgggcccaggaaaagtataattttaaattggatttcaactttctcttcctctgttagtttattttaaaataatttaagaataatggctgtgaataatgaagaggttatgtcctttatattcacaattaggttattttttcattgtatattacattcctgggatgtagaatcaaaaatgggactaaatctggaatcataactttaaagtttcttttttacttactgaagttagtcagtacataattgtatcatcttgattcactccagcattgtacaattctccaaagtacttacaaattttagcctgtcttttctgaatctaagtgaaaccatcctcaaaattgtttctctgtaatttaattttatattcagagtgagggaaatttaagaaggttcaaaaggctcctggagtcataaaagcatattctggtgctttgtttctggtgcgtgtttatttaattttaacataagagctgtcctgttttataatgcaaagaattagctctctttttctaatgagcttctccaaatatatctctgaaatagtaactgaagtttagtgcataaaatgatatgatgttagaatttaattcataatatttatggtgaggggtaggaagtgagtctgcttttttatgtagtatttgaaattttccataagaagataaaatctcttgctttctttctctctctctccctcttacaacccgatttctctctacactgagatgaatagaaactgttagtcatttggtgtcctcctgtgttactacacattatgaatttagataaaattcttatgtttccttttcttacaaaaatttgctctctgttctcagatttttggagcatgtattctgttgcgttatgaacaatttattaataagggaactgttatcaatttgagttgttttatgtgctttgaaacaaatgttagttaagatacttgtatcatattgtttactaggctttgtatctcaatttataccattttatttctgccatagtttcgaattcttttttagcaagccttgtattgaagtgtttagagagaataattgatacttgtcccacaatgagtactaggttttaatttatttgtgacatagtttcagacttacagaaatgtttcaagactagccaaaggaattcttgtctacccaaattccccagtttttttttttttttttttttttttttttgagacgtagtcttgctctgtctcccaggctggagtgcaatggtgcgatctcagctcactgcagcctctgcctccctggttcaagtgattctcctgcttcagcctccctagtagctgggattacaggtgtgtgccaccacacccagctaatttttgtatttttagtacagacagggtttcgccatgttggctaggctggtcttgaattcctgacctcaagtgatccacctgcctcggcctcccaaagtgctgggattacaggcatgagccaccacgcccggccccaaatgttaatagatcaacttatttgctttatcattcatattctctccctctgcctgcataaacactaacacgtcattcacgttctctccctctgcctgcatatacactaacatgttacgtttttgcagccttaatatacccttatccctacatacttcaatgtgtaatttctaaaggcacagacattctcttatataactgtagtacagttatcagaagaagagaccttgaacgtacttcattagtttttcttaattccacataattgttgtctataatgatttttctacttgtagcatagctttagtgtactacaaattacccaacctactgttccttttttccctcaccatctactattttttatcccttcctattaatatagagtacagtgactgataagactttgatgatagtggtcagtcatacttgactgttgctagatgacaagactcaatatctttaagccagaggtccccaacccctgggccacagactggtgctagtccctggcctgttaggaactgagccgcacagcaggaggtgaacaacaggcgagtgagcatcaccgcctgagctctgcctcctgtcagatcagcatcggcattagattctcgttaagagtgcaaaccctattgttgtgaactacacatgtgagggacctaggttgcacactccttatgagaatctaatgcctcatgatctgaagtgaaacttccatgaaacctattcctggtgccaaaaaggttggggatcgctccttaagccactctctgaagagtttgttgattatacctggaaactactattgacttttctgattgttcttttactataagttatctaaaacatttaatcataaagttttcagaatataatatatggtttgattatcttaaaatttaacattttcactaaaatacatgtattttgccttgtcaaaagtaatatttgattcgtgagaaccaaatatattctgtgaattttcatttttgctatattctgagttttgaaacaaatctcagacaatatttcatcccattagctttcatcctattagattttaaaggctatatttattttattaaattttttttactatgacaaattcttaagactggagttagctaatttccattaattattggcattaaattgtattgtatttgctgagaaatctgatggctccattaacgtcaccagggtgatgagcacatgagagttttcattttccatgtctctttttattctggaaattctcatttactcaagctttgcttttataaaattcctttcctagtatttttaaaataaaatcaacaagaagtatttgacatggattatgtagaaagagaacacagagtgacccacttatagacaggtaaattatattctgttttcaatatacctgataatgtagttggtaaaattatgtacttaggttagataagcttccacttcatctatgtccgaggtattttgcacatggtcataaaataaccataaagtgttatatttctaaagtagagatttctaaagatttctaggatccagtaattaaatacccaaattgagatagaagcctcaacttaaaccttaaggggacaaaacgtgtgtttaccatattcaacatctgccttcttatgtttgcaaatacatatgcctgaaagcctgtgcagtgtcagggaccatctgtctcactgcgagacatacatgaggccagtagaactacaaatagcagaagacagatgtatttacaccttcttgttcagtaccttgaagcagcacttggaggtaataaggcctgttttggcaacagctgctgcttaactctgtgacagtatacattgatggaggtaaaagaagtgttagacattatttggctccaataatcacccattcaaacagactctgttttctttcagtttaagactggaggtttaaaaagtccaggttatcatgttcttatcatatgtaagtaagaatagttctcctaatctattaaaagtggaattaggtgctaagaggttgcaccatatcttggatgttaggtttgtagtagggatttattagcagcatttcatagatgtttggcattatcaagtgagtgatcaagttttaaaaaatattttctatgtaacaattcacaaaaaaatgttcatcaatgagcttaattttatctgcttaaatctaaaattatttatatttccaaattattttatggacacaagcagagaacagtaaatttcaaaaagaagtcatggtaggtagttccgtgggaataaaaaatattaaaattgaaaatgaagttacttccttgctcttactaggtggagcactttttgtgaagtaaacatgggatgatttgctctctcgtaggtttccttttccttaaatggaagtagctcctcatttctttccccctccccatctttatatttactcatttcatttcttctcttttcttttgagacagagtcttgctctgtcacccaggctggagtgcagtggtgtgtgatctccacccactgcaacctctgctcttgggctcaggtgattctcttgcctcagcctcccgagtagctgggactacaagtgggtgtgtgccaccatgcctgtctaagttttgtattttttgtagagattgggtttctctatgttgcccaagctggtcttgaactcctggtctcaagtgatccaactgccttagcctcccaaagtgctgggattataggcatgagcaaccgcacccggccatgtttattcatttctttgtgaagatttaggtggttattaggaagcttcagatgcaccctgtagaagtaggttaagtaatgtagtggaaaaaatatggaattgggagtctgaggccctggcttcttctcatctgggttctgcacctatttgccagtgtgtcctaggtaaatttcttcacctgaaaaaaaaaagtttatatatatggattataatcttttaatccttatcatgtatgagtttctaccagttctttggtcccatttctaagcctcaggactgttgagcagccgtaagccagtgctgatgggctcaggccccacttagaaagcatagatgcttttaaatgatattaaatggaagcattaaatagcatttattcagacacatccagttgatatttgtagaccaaatctaccatcagacttggctatgtgagtaaatgatattggcatatagtaggccttgcagaaggtctattccttattttaattcaattaggtacaccttggctcagttacacagtttggcctgagccttaaactttataggcaaagttcggagaattaaattggaaatatttggagaaagacccactagatacagatataatagcttgggtaattccccacctcatgtttctgccttatgtaagtaccagttcttcatagctaagcaatggatgtttggttctagatattaaataatggacaatgtattttcattggaatatgtatggatgtgactacatatgcaatatatttaacatagtttgagttccaatttttctgctatatcagtggagtacttaaaccacaccatactgtaaatctgggaattttttttggatgatgtctactatataccatatatatattttttgtttgtttgtttgttttgttttgtttttgatatggagtctcgctctgtagcccaggctggagagcagtggcgtgatcttggctcactgcaagctccgcctcctgggttcacaccattctcctccctcagcctcccgagtagctggaggcgcccgccaccacgcttggctaatttttttgtatttttagtagagatggggtttcactgtgttagccaggatggtctcattctcttgacctcgtgatccacctgcctccacctcccaaagtgctggaattacaggcgtgagccaccgcgcccagcctataccatatttttaaaagtcagcaggcataaatttctacagaagtttgacattatttatgttatgttcatctctttttttgccacatataacagaattttaacattatcaatgtttttttcctaatgaaaagtcacccaggctcaagtgcagtagtgtgatcatagttcactgtatcttcaaactcctgggctcaagtgatcgtcccacttcaacctcctgagtagctggtactacaggcctatatcaccgcacccggctgatttttaaaatgttgtgaagagataggtcttgctgtattgcccaggctagtcttgaactcctacgctcagtcttgccttagcctcccaaagtgctggaattataggcatgagccaccatgcccagcctgctaatgaaaatcttctaaatcttgagtttatcacttaaaattgggtatcatgtgtatctcaaattagacacttgtctgttttagcttcagtttcccctacagatcaatagtttactaccagtaatacgataggtctctttggtagggagcaagtaaaattaatgaaaaattcaaagtataacttaaaaatgatattaggaataatttactgatatgcatgtgggaaatgcaagttcacttcagttgttgttttaacagagggcacacagaatttagaagtcattagcatccctagaatttatttttagagaaatatggctctgcttcaatatttgacacataatgttgtatagctttttctctgcttcatctctgtttattacatttaatatttatatgggctcattctgatgtctgttctgtggcagtgcctgaattgtcttaggacatgattaattgaaaaataaggtttatagagtatgtttataaaatttgtctcttagatgccacgtacttctttaactctggagatgattgaacagaattgttactaataccttttagcactagagtcagattatagaggattggaggatttcaaatcaaatctagttttgcttttttctcatattaaaaaaattcttcgtgtttaccttgttttcagctagtaagattgaagactttgtggcaccatgtggcattcaacaaaatgaatcagttgaatgacttacatagtgttatggtatgttataaaacataattctttcctatcttctgggagtctcctgaagaaaccctttgagaactaatggccaggtcatttcacggtggcctatatataagtctgtaatatttctggatttttagtctcttgaccagattttcctgagatttgaaaatcagaattcaggtcaaaaaggatataattatgacaaattgagtaggttttatatggcatatttgttaagcctgctaaaatttaatggtgattggaaaacaccaattattcgagtttgaatatagtaatttgggttgcctctgttaatacagagaatatttcattcagtatacactcccactcacatcatctctttttctttccactctcatctcactttaatacgaaactatagctgtgaacttttgggaggggagagtgaagtcataggtgaagacagctggatcatggatttgtactttgtgactttatattttcattcctttgctactgaggaaagatgaagcaggcacatttcaaaagaacagctgacactatccatacaaagacagtaattacgtcagtcactataattctttggagtttgtggatcttcttttacatgtatatggcagaggtctagcttgtaggactaggccagaggcagatgagtatagattttatacatgccaattgtacatgctaaaccaggttctaaccttgtctctccagttccctttctccttgagttctgttagccagtgaatcctagtttgattgaattaggataactttaaactaacacaagtgggtcaaattgtgaatagtgaaccttactgtattcaaacttaacaatgatgttatttatttagtacaggcctgtaaactacagtgtctgagttttacggtgcattttaggattatgggacaaggaagtagttggagaaatctccttttggcaacatgttactgcctggaaaggaaaatctcgaggtttttttttttaagtttctatatttttctttggctaacgtatgtttcctttttacataaaaggaaacctaaacctggaagaaaggtatttactggctctacaggtagggaatatcagatggtcttttgaatttttagacacttgaagtttttgtttcatttttgcttgtttggtttttgcagccaatggaaaaaccttttaagtaataaggactaagttaaacttctaaattctttataataaatcaatatgctgatgttctggatgagatgggagactgccctgagtaggtacaatataacgacgtaagcctggacattccagattacagtcacttctggacaatttggttagttcaggtgtcttgcctaattaggtgaaattaagagaagttgtatactatatgacaacgaaaacctcttcattttagaggtatttgtaggcatatagaaatggcgtgaaccattccttttcctatcatttcagaacgggctcactattcagttgagagattgtagtcttcaagtagttttagttatttaaatctgtgtttgtcaaactgcaagctgagctctagtaacattttggttttgaggtaattagtcatgaaatcatataaggagattatggccaacatttttttttctttaatgaagtagaataaaagtgcaattctgccactggttctgtggaccagcagcattgctgttatctaggagcttatcggaaatacagaatctcagatcccagccagacccacagtgttagaatatgcatttatctgcattgtaacataatctcaacattaatgtttataaaacattgaaataaaaatagtaacatttattacagataacacattcattaaattattgtttctgtcttgtttgtgtgtactcgtgcacataccagcttacaccttaaaatgtatttctatgggttcacagtcaaaaaagtttaaaatctactattttaaatgtggatgctgacatcgtaccgctgggtatgttcttatctaactgagagagagctatccttgcttggcattggcattggcatcatctctaaagttttgttttattttttatctatcctatttttccttctacctcactttcttctagttatctcttgcgtgtctctgttcctttctttgtatataatgcgcttcaagcctcaaaattgtactcactatcgtgaaaacatttttctcaagttttgctttgtggtcaaatatactcagtttactgggaaaaaaattaaggctaatcagcaggatttttattttttaattctagaaccaattttgaagaaggaaatacccacattttaccaatgtgcttttctcctccatttgttatgatttccaaatgtcagatgttacagtaccatttggtttggatatcattaaatcactcagttttctttatgtgcagatgtgcatggcatatcttaaatgctaggaacagaattttgagaagaaatatgtataacattgaagtcccagtttcccagttgtatttaaaacaagtgattgtagctttagtttgctgcgtactaacctaatctagtgcagaccaggtaaaggaagctaacctcttagaccactattaagagatatcctaatttcctggattatggccaaaaatagagaaaaattatactagttgtacttagtgttttttcctttgaccaacaatatacaattcaacttacgacaaataagcagcttgaaaaatatgtgcctctttctgtggttctgagactggaaccagtgaaaagcagacaattcatatcaaattttttatccagtcatcgttagctaattttaaccattttgtgtcacatagctacacatttgttgctattgatctcactcttctccatctggttattccatttaacttataccttgttttaaagggcttcagcagtgaattttattttattttaacttagaaatactacaggggtgctccagaaaagggggagaaatagaaaattttgaatctctaactctgaaaattaagggccttgttactacacatcattctgtttattggttatatcagacagtatgtacagcagaattgtaaatgattactaattttttagttatttttatccatactctataacagtatgatatacttgtatttgctaatgttaaatgagtttttctctaattttttgtgcatttttcccccttttccatgaaggccttatctctttggagcggggtgtttttccataaaagccccatggtgagttccagttcagtcccgcatgcctcattcatttgctgtactctcaaaaagtaatttgttttgtagttttgtttccagttgcatggcctgatcacagatagatgcaccaagttactgaataatttgtagatggaacatgaatgttgatatttaagctttagaaaagtggttttcttggtttcacttcattctttaaaaagtaaaaaacaaaaaaaaaaaaaccacagatgaattttttttaaatagaagaattctctcataatgctcgtaaatattacaagacaaggctaacacccaagtttaaagctttgagtattatggcattagaagttacctacatatcatgcatagcatttgaggacatgatttattttgaaatataaatatatttaaggtataccaaaagcaccttataaagtttttgttgcattttatttggtcctaaagagacaaaagttctgtttttgaatagtttaggtatttaaggagctacataatgacaaaatatatattttacataaaacctcctaaataatttattattttgaattattagcacatactcatcatagcttaattatttggtaaattctttcatgtcagtgcacagaatacagctttgtcagtcttagacaggaaggtcatagaaaagaattcgaatatatttaatactttcatgtaaagataggaagtagaatgtgttaagaatggtataaaatgtttaatggttaagagtcagactgcctgggtcttagatcccaattgacacacttactagctatatgatttggggggagttttctaaaacctttctatttcttatttccttatgtattaaatgtacctatgtaatggactcactatgagtattaaataagctgatacatatctcagtatgtgttagtatataacagtgcctggcacatagtaaatgtgcagtaaatgttagctgctaccactgtttcttttcctgtttcagggaaaaataccgtgtttcaaaagaagcttatttaaattagattatgtttttcacttttaaggatatgttaaccagtgcgaagttttgagaaatgtaagctatattaattttattaatttagtcagaatactgaaaagagttctgcacatatgtgtagttctcataactgctaaatggggattgttcatactgttctattacactagaaaaaaacattccaacgttttttcctcttggacagaaagaagcttaaatagttctttaaggttaattattatttgacacaaacttatttcaatgtttatatgccataggaagatctgaaaattttgttattgcttaataataggtgacataaaacaaatcaacataaaattttcctccttgaaaattataattagacacagtttgcaaaactattctaaacaaattcaggatatacaagaatataaatctcatgaaagttgatctttattcattttgttaaccagatgtcttctaaaaacaaataagatacacagatcttacttatgagccttccagtgatcagtgaattttaaatgccacattcaacatatgacaaaatttctttgtaaacttagaattaaattccattttaggataaattcttcttctaagtacaaagcaaagagttgtagtatgttaataaagattgaagttttgcatagaagtaaaagatggaataacaactgttgtatgttaagtaagtaaagttcattccttcaacagcttacgtgctcctcacatttaagcaaaagcacttgtcaaccagaaatgatttgaggttgaaacaagattaaaagagccagattaaagaaagggatatattaaatatagtagacttttaaatcattgcctgtcttttagaagactgctttgtggtttgtttgatgccatcgttagctcacaagaaactcgtttttagtcacttatactagactaaaaggttctcctttaaaatgttactttcccagtggtgcatgttttttccattaagatcttaatgaaacctcaaattaaggcagcaaatgaatataaatttgacaacttcttccattttgtttataagagctcctttgttttaatagtttttgctatttttccatgttatttagcattcaacctgagaatgtttttatgtactgttctgaaataaaacattatatgctaaataaatatgtttttagtatatccagttatagggtaatatatgtattttggatgaaaaatgaaatttttaaatgaaatgtaaattttctacaaactttttattagtttcgagttgcaacgttaacacttagctaagaatttgcttttggtatatcacaatttctgctagttctttattctccattaaacaggtttagtcctttacattcatatactttcagatgagtcgttataaaatacagtcgttccctttggtaacaaaataagcttgttggaaagtaaactatgcatcttcaacattttagtcactttggacttccctggtattatgtgtcatctaggttagtttaggatatttgagtttggatgactatataaaataatacaaaagaattacacatataacatacttttttaaacataggaatttaagataaataatcccagtgtgaatttttgaatctgaattttgctttcaatattacaaataaataggaatgtatcaagctctgaatttgcatgtagtgttgtatttaagctactgttatttttgaattgcttatcaaaaaacatacatgacaggtagacaatgggtagtccatataagtatatttcttcctcataaaatgttttcatattatataagggtaaattttaaagaattaaaatttgcatattaaattagaaagttttaattagtgttttctaagagttttgatcaagctataaacagttcatgtaaactaatcttgttctcttaaatattttaaaattttatgatttcattttttgaaagatacgatttatatggagaggagaatttattcttacctgccacatttacacaaatctgttagacctttaagaaaaatttatgacagaatagaataatttcagacagattattaatatctttagttatttgaaataaaatgcttccagttctcccatttaggtcttatgttagaaactaagattgagaatgagaaaaaacttctaaaagaatataaagaatattttttcttttatagaaagctgttataccacttgtaatacttagatcaatattgggtcttacatttaaactcaaatattgactattcttttatgttttaaaaatgaaaagaaacggtgcttctgtctcatgttagcgccttccatgcttgtgtccttccacagaaggcactggagcacattgctgcttatcatgctgtccacagatacttcacatctgtcctattcagatggagatcattgtcctgtaatttttaagcagatatcattagaattttgtactcttttttttctctctttgcagttgggtgtggagaaaaaaataggccagagaaattcaatatattgacctggctggattacataataaaggccaagggaagaaaaatggggaactttagtagcctttgcaaatatttttgaagtcctagtaatgttaatatccctataacttcctctgattgcagtgaaaatgattctcgttctatggttagacagttaagcgtttcctcagaagaaatgacaaagagttaaactcctgatttttaatttagcatcttatttgttaatttggttattcggtttttttgtttgcttgcgtgtttgtttttcttttgattacattgattcgtatcaggcttagtaaatatgatgttttatgattgtcatttttatgatgctgaaagttgaatttattccattttttcttttattttttgctcaaaagttaagtcaaatttttaaaaaattattgaacatggggttatgtgtgaaaaactaagggtagtaaaggaacaggaattgtcagtagaaaggagtccatcgagagtatgtcttgttctcatgtataaccattttaaaaaaaaatggatgagtccacataatcaatacagttaaacttttgggcatcaatacaaatttaaatatttttctatcattgtattattaacttaataaatgattaaataaatgagggaaggcatccaaacacccagagaaattctttctaaacttgcaaatgttctttaatgagattttttaaagaccccttttggaggagaaagggagatgttgagaacaagagagaaaaaaaaggttagcattggagtgctttcctatgagggttgggtcagcaatctgtaaatttacataatatacaaagctagcacttttctaatacattcacgtatgtatcatttttcaatgttttatctttctgtcaacaaaaggttattttgtgatagaaatattctaggtcattgtggaaaagttcatacattgtatgtcactggcatattgctagaaaagcccttctacttctgccaagctttcttggacttttaaaaacttaggatgaagggcagattgaacccaagttaaaatttctaactttgagtgtatcccatagaagatattttattcataacgttctttttattagattatttctcctttttattcctctgcaaatcttaaagacacacacatatttttatgtttttattttgctgaaataccacaatcattccagattatagattgatgatagaaataacttgatatgaatgtgtttacccaatatgcttcatacccaacacacaacactatgttatgtagcagatagcaagttattttcagggtgaaaactcttttgactccttaataaacacagacttttactaatgaaatttaaggccctatcagaggaaaaaagaaatgatgaaatataaaaataaaaatggtaattctttactgaaattaagcatagttttaccataaaatacttattttctgtaggagatactgagcttatgtaaaaataacaccgtgttgatgctttttacttgtgtgttccaaaacagaattgtatgtaacttatagatgtataagagattttagcttttgacatgagctgattagactctaaactagtaaacatacaaaaaatattttttgtatgtcaaaaaactaaattgacgtcctctcatttttctactttttattatcatgttagaaagtttgccatctggcctggaagcaactatttttaagtctgtttaggatgcatacttcagagggaccatattttctcttaagaagaggcatgctcacttgttacttaccacatgatttaaaaacaacaacaatgacatccagtaatttgcaaagagctttgagtttgtcccaatgaagcttgttggtacattgtagtagctttgttctctgatggtgattctagtaaaagcacatagtcgcacaattgcaaactgctttcaaaaaattctacaatacttttctctttcccgttcccccagccaccatcttcccaaaactcctaaggattaaaaatgaccagtggtacctcaaagataccagctagaggaatttgtcagttcaatgatagcagtttagtgatggaaataaaagctttgaaagaagccttatattctcaggtaatgcaacagagagcatcataaccagaaagaacaattctgatgccagtgacccagatatcatgggaaggtgcatatttgttcaggtatagggcagagaagagtcttcctttctggaggtatgttactacagttgtgacagatgcaagtatgaagaggtgaaacagtttatagagccagattcagcttcccacagaaactttttatttaaaaacgatgtctttattccctgtcactggaagtctcactgtgactggttgacattttaggcatggatgttttttgttgcaggaataatgagaagtgttttaagaaatgtaaatggcagaagaggtttctttcatatatagtaatatgcattaccatggattttgttcaaagtggggagaccaaagggaccaatcatagttgcctctgatccagacttagccatccttagaggaagatgtttaaacaagcctcaggaaataagatgtctgagagactatttaaaatgtcataggaactgggaaactgagattaccaaagcaaagtctgaattttttgaagattaggttggggctgagggccatatagaaaagttagtatttgctgagtactgtgatatgggaaagtactgccctgggaactttacctgctttgtctaatatagtggttctcagagttgagcatgcatcagaatcatctggagggtttgtttcaaaacacggattgttgggctccattcccagaatttctgatttagtaggtctgggatggggcctatgagtatttgcttgcactcctaagaagtcctcaggtggtactatgagctggggacagtgctttgagataatataatcattaaaataatcctatgaagtaggcattactatttctattttacatattagtagtctgagctctgagaggttacataacttaaccaaaagtcacacagctcagaggtgccagcactgggattcaactacatgtttcttcctgactccaaaactatctctttccatcccaccatactttagtaaaggatgaaaacaaaaattgagcaaaataaggtagaactaatgtttgacattggaggctaactagcagagaggaacatcagagctctagtttttattgtttcctaccttggctgtgatctttaccagtgcacgatgaggctactggtttatgaattagagaaaataatttatcaaaggtgattggcaaaattgctttgggaagcccttgataaaccaaaagagaacagaaatacgggattgaaaaggtgtgaggtcgatattagaagctgagcatgaaaacttatttgtggaaaacagaggagatctacttcttttgaatggcagtgacaggaagtaatggcagttactaaatgtgtcctcagacatatgagcaacagaaaagatttaggtttgagaggctattgatatgtaattccaccttggtctttttctctgaacaaaaatagacacatcattttcacaaatccgagaagaaaaagagacaacaggaagatcagtgaatataattgcattagatgattagctattcttcccttgcactgtctaactctccatagcattgtggccgagagagcattttcaaggcttcattctatatcacctcattttcatccatgctgtctaaattcatttatactgttaatcccacatcttatagattggtgcaaaggcagtggcaaaaaccacaattacttttgcatcaacctaatatatatagaaatgaagtgataaaccattttattattgtgagatgttcatgctggtactattgcttcactttgaaatttctagggaaatgttactcatctgaaaagaggtgacttggattttgccagcacatacttcaaaaaggagttgatttttattggtcttataaatgttgctctctttacaaaactctggaactttgaaataattctacttttactccagaacatagtctcacatcaccatttattacttaaggcaaaatgcatgttcatactggaggatttgaataggggtggaatttaaaggaaaaactgtcattacctaaaggagtatcatttcatcatgataattgttttttactcttattttattttttaagcaaagttaaacctcctccacaaatttcacccagcaaatcgatgggcggagaattttgtgtggctgctatcttcggaacatccaggtcatggtttgcaaataatgcaggtctgaaaagagaaaaaggtatgtatttttactgaaaaatgaatgctctatttgtaatttttgcttcttaaggaaaatttttagcagtttccctagaataatcttgtacccagtagtctggaaaccaatttttttaatgtaattagcatgtcacttctcaactactcaagcctagtcaagaagaaaaactatcctctcagtatgaacgttaatgaattgcccactgagtgattttgttttgttttgttggtgacaatctacaggtgatctcaatgctgtcaattctatacccattttataccttttacatttttacaagctagtttcacccctggtctgtgaagtacagagaggaaaagcgtcattgtccctgttttagagatgaagaacttgagaccagcaagtttaaatatcttagctaaaagtactggttagttaggcaatggaatcagagtttgaaaccagattttctaatgctaaaaatcttcacattaaaaaaatcaactctgccatgttttaaaacacaattaaggccagtcgcagtggctcacgcctgtaatcccagcactttaggaggcagaggtgggcgatcacgaggtcgggagatcgagaccatcctggccaacatggtgaaaccccatctctactaaaaatacaaaaattagctgggcgtggtggtgcacgcttgtaatcccagctacttgggaggctgaggcaggagaatcgcttgaactcgggaggcagaggttgcagtgagccgagatcacgtcactgcactccagcctgggtgacagagcaagactccatctcaaaaaaaaaaaaaaaaaaaagaggaaacagcctgccagtgagaaataaggctcagcttttgtggttaccattgctcctttgaattaatatacagtagtctctccttatctgtggaggatacatccaagacctccagtggatggccgaaacctcggatggtacggagccctatatggtacaatgcatttcagtctaataactgagataggtactatgggactaatgggttggtagcgtatacagcgtggatatgctggacaaaggatgattcatgtcccaggcaggacagatgggacaacgagagattttaccacgctattcagtctgccatttgaagcttatgaattgtttatttctggaattttccgtttaatatttttggactgcagttgaccatgggtaactgaactcgcacctaaggagggactactgtagttattatctttctaatccctgctttgatcaccagggtcaatacctaaaatgtttataggattagtgctttatagcatgtgaatccttattgcttctgtttagaagagaatgcctacgttcataaaccaagtatataattttgaatgttatgattttccccttaatattttagtattattaaagtaggtcacaaaccgggttgttactggggcacttctctggtgagttccacaggctgtattgttcttggcaaaatggctctcctttatgctaacactggcagtcagacatgagccctttctcttgttatcgcctttcagtgaccctttacttggtaatgggatctcacgcgcagcaggttccttacctaagtgggagaggatactgttaagtatgcaagccttccatttccttatcccatctttattttttttgttacctccttaggtttaatgatgctatcgaaaggactttttgttactagttaaaaccctctgagaagctcgatttcaaatgcttctcccttctgttctaattacctttttaactttctactcctttatgtccctctggctgatcattagctattttctcaaatcagctgtaattgattcgcctgacacagagataagatgacctacccagcattcatgagtgattttatatgctcctaggtttactgtaaaaccggagagagaggactaaacctgttttgctagtgggtacatgtgtattccttataaagtcagttgattagatccatattcagcacctaacttctcaaagtatggctgatcttcatttaccatggcgccagtgatcccatggagagaaagaagaggatttgggggaaggggatgcacatgcatgcctgtgtatgtgtgttgaatagactttattttctaaaggagctttaggttcacagccaaatgagcagaaggtccagagatttttccatatataccttctgtctccacacatgcaaagcctcttattatcagtatccccaaccagagtggtacgtgtgtttggattgatgaacctacattgacacatcaaatgttttttgtttgttttgatccacaaatttaagttctaaatttaagtcttctgagaaaaaaaatagatgagacattaggctgatttaggcatacaactaacctttcatgcaagtcatttggtacatgcagggtaactaaatcctagtccatacattattccttttcagttagtccatttcctgatatcattcatttttcataatgtgggacaaattacattgtagacaagtacaaaagtctatgaaggattttactatattaggatttggggcatagtagtatcattcttgaagtaagttgcttaagattgaaaatactctgatatcatagacattttcatattcactagcatgtgcttatacgaggcaacctttaggcaaggaacaagcaccatatgaaaaaattcctgtcgtctgagcatggtggctcacgcctttaatcccagcactttgagaggctaaggtgcacagatcacctgaggtcaggagttcgagaccagcctgaccaacacggcgaaaccctatctctactaaaaatacaaaaattagccgggtgtggtgacaggagcctgtaatcccagctactcaagaggctgaggcgggagaaccatttgaaccagggaggcggcagcctgggcagcaagagcaaaactccatctccaaaaaaaagaaaaaaagaaaaaaattcctgtcttttcattttctctgagcagcctcaggagcagactaataagatcattaacttgtaaaaattattctgtgctccatttatgccatcataacacatcgggttctgtttctctgtttgtagatcagtccaaacaagttgtagttgagtccctgtacattatcagttgctatggcaccttagtggaacacatgatggagccgcgacccctcagcactgcacccaagattagtgacgacacaccactggaaatgatgacatcgcctcgagccagctggactctggttaggtagtacctcttttctttttttctttttaacagcttcattaaggtatagaagattaaaagcgtataatttgataagttttgacatgcatacagctacgaaatcatcaccacaattaacatggtaaacaaatacatcactctcaaatgtttcttggtgaccctttgtaatctctccttctttcaccccctttgtctctacagattagtttacagtttctagaatttttttttttttttttttgagacggagtctcactctgtcacccaggctggagtgcagtggcgcgatctcagctcaagcgattctcctgcctcagccacttgagtagctgggactacaggcacacgccaccacacctagctaatttttttgtatttttattagagacggagtttcaccatgttggccaggatggtctcgatctcctgacctcgtgatctgcccgcctcagcctcccaaagtgctggaattacaggcgtgagcaaccgtgctggcccagtttctagaattttatataaatggaatcatatagtatgtaatttcttaaatctcactttcatctagcaaaacaaacaatacttcattccttttttttgttttgtttttgtttttgtttttttttttttttttttggagacagtctcgctctgttgcccaggctggagggcagtggcacgatctcagctcactgcagcctccacctcccgtgttcaagcggttctcctgcctcagcctcctgagtagctgggaccacaggcgcctgccatcccatctggctaatttttagtagagatagggtttcaccatgttgtcaaggttggtctcatactcttgacctcaggtgatccactcgccttggcctcccaaagtgctggttttatagggatgagcacctggcctttcattactttttcatttgacataatttacatacaataaaattaacccattaaaagtgacttttcacaaagttgtgcacttatcactgcaatcagttctcatcaccctaaaaagaaacctcatactcattagcagtcactccttatttttctccaacccttcagacctaggcagcagccagtttactttctttctctatggattttgctactctgatcatttcatgtaagtggaatcatataatatgtgaccttttgtgtctggcttctttcacttagcatattttcaagatctatccatgttgtagcgtgtgtcagaatttcactcctttttatggctacataatactccattatatggttatactgcattttgtttatccatttattagttgatggatatttctactttttaagctgttattaaataatgttgctgtgaacattcatgtacagattcttgtgtgaacattttttttttttcctgagatggagtcttgctctgtcacctaggctggagtgcagtggcgtgatctcggctcactgcaagctccacctcccaggttcacaccattctcctacctcagcctcctgagtagctgggactacaggcactagccaccacgccagctaattttttgtatttttactagagacagggtttcactgtgttagtcaggatggtcttgatctcctgacctcatgatccacccacctcggcctcccaaagtgctgggattacaggcgtgagccaccgcgccggcccatgaacatatttttttaattgtcttctgtatgtaccttggagaatacctctgtttgaacttatttcccccttgcacttctgtgttaaattttcttggatttatgcttcctctatttgcaatctcatgctcaccgaaaatagagagtaacattgagatagccattaaggggaatagaaactaatatagatagattcaaaggtttctctgaaagtaattctccaagatacagtggttaagccttataggaatgtttattaagaatcagagtccatctcaaacgtgcataatgattagaatctttataagctataaccaaaaggaaaaaaaacctggaataaaacctctttaatatagttcattgtccaggaaagaaaaaattgctcctgacatgtatggaaggaaacagacaaaaatggatatgaaaatgatccctgtccttttgacattttaaaatattcttgtattgatttttggaggctccagcattctttactactactttactatgctggattgatctgatcaatatctgatttatcaagcttatttaggagtgggcagatctaattaaagttactacactatcattgttgaaatagtaacttatttcagaactcagatgctaatttgatctataataagtcatccatttacacagctgtgttttattaaccatttttacctacttcattttattttaaaatatacacatattttaagaatagagaggtcagaaattacataaattagaactagttagttgtaacatttgaattttacacctgtttaatcttctgaatgtcttgcctatcctgttggagggtcttctgctgttaagcttatattgactgcatgttatttgtatgaaagactgccacctttttattttttctaagcagatggccttgtgtttcaggtttcatcacattcattttaatgattacaagttcattttaatgatcacaaaagtagtgtgagtttaagtcactgttcataagtgatgacagtcatggtgatttacatcccatctattaagcttaaatattaatattcttctcctgtttccttagaacccctcaatggaatgaattgcagccaccgtttaatgcaaaccaccctctgctcctcgctgcagatgcagtacagtattatcagttcctgcttgctggccgtaagtagttcagattttttttttcctttcgtatggtctattcagatttcatcttaaaatgctagctttgaaagcaaacattaccactggtccataggccatgggccttaaagaatcagtttgaggcaaataagatatttaatatgaatataaactgtaagccttagtatacattatgtctctgactgcttatattctttacctatgaaatatatttctgtaataaaagttaagttgatagggaatatctggagggctcaaaaattcaaacaaacataaaaaccaccacctgaaaatgctaggatataataaaaagtttcataaagcttggaatctgtttctaacatggaaaaaaaaaaaccccaaaacttagcacagttaaaagtgcaactatgaaaacaatgccagcaggcttttcttttggtagaattttacttgcaataatgaggtaaagatttcaactacatttgttaatttgtttgtttacttatatgtttaagcgtgagcatttgtagagactgaaccaagttcattgacctagataacagctttttatatgggagtcatttaaaggcaatttagtatttattatccagtttgcgtttatagaattaaaaattatttacaattataattcagttttgtagatatagacagaatccttaatttaatttgatggctctgagtagtgcacgctttaaagaaaattcttaaaaatcaacattgacatgtttttaatgaaactttgttgtatttaacacattgtcttgcccggtatattagaaagcatgaattaaaatagttgtcgaatgattttattttatctttataatgtgctatatattatactggaaacagaaatattttatagactttgctctcaagttatgaaactctataactgtaatcaatagttggcagtcttgctctctcatattattgttgaactctctgctttttctagggcatttttattgagtgcctactatgtgtgaggcagttctgatttaaaggtgattagtatattgcttctctcctcaatgaattccctaattcaggagatagacatttaataaaaaagtaaaataaagtggggtaggtgtgtcagtggagggttataaattgaactgtgagagcagtgacgtgtgttgcctatggcatcacagacgggtgatatgtaagtggttttcgggttgattcaagaagcagtgcatatagaagttgttagtttctagattttttaagcatatatttaactatcatatgaactggaaaaatacatgacatgaatatgatatgaaataagaatcatgagtacattttccattacctctcaaggagcaaaactaattgttgaattaagcatagttgactctttcagagttaatattgtgttttgtgttgttattttgatacctattaagtctatttaatagacatactataacaagtctgaaatatttataaaacacataggggaaaagatatagctatatctatctcttaattgttttttgttccagtgattgaccttattgacattacactctgcttgattttagctgccctaaacacctttgtctaatgctcagaacaacaaaaatccccaggtgcataatttaagaaccaccactgttggcagtagtaagccattacatgttttcaagcataggaatgacaccatcaaaattgtattttagaaagatcattctgggctgggcgcagtggctcacgtctgtaatcccagcactttgagaggctgaagcgggaggatcacttgaggtcaggagtttgagaccagcctggccatcatggtgaaaccccatctctactaaaaatacgaaaaaattagccgggtgtggtggtgcatgcctgtaatcccagctacctgggaggctgaggcaggagggtgacttgaacccgggaggtggaggttgcagtgagccaagatcacgcccttgcattccagcctaggcaacagagcaagactccatctcacaaaaaaaaaaaaaaaaaaaaaaaagaaagaaagaaagatcactctggcagcactgcagcaggaaattcagaggaagggagtggaggctaggtgatcctagagcaagatgagaccttaaattaatgctgtattacagagaagacaggacagacctgtgagatgtttaatagttggcatagaaaagaattagaggctgggcacagtggctcacgcctgtaatcctagcactttgggagaccgaggtaggcagatcgtctgagctcaggagtttgagaccagcctcggcaacatagtgaaaccccatctctactaaaacacacaaaaaaatcacccaggtgtggtggcgtgcacctgtactcccagctactcaagaggctgaggcatgagaattgcttgaacctgggaggtgaaggttggagtgagctgagatggtgtcactgcactccagcctgggtgacaaagtgaaactctgtctcaaaaaagagagggacaatttgaaactaagtagttactaatgattctgtggtttctcatatggaatacagcaggtccttgaatgatgtcattttgtttaacatcaattctttataaggctgatgagaaaaaataatcgctccctgcctggggccattgcctgtgtggagttgtcacgttctccccatgtctgtgtgggttttcagtgggtacacaggttttctccctgataccaaaggtatgcatgttaggttaattggcatggctacattgtgtcccaggctgagtaaatacgggcctgtgtgtgcgagagtgccctgcaatcgaatggtgtcttgtctaggatcgggtcctgccttgcaccctgagctgccaggatataggctctgtccacccacaactctgaatgaatgaatacaaattattgtaaaataaaacttcttaaaatatatggtaaatcacagaaatgcacaacaataaatgttgctatatgaaagtgctcagcaagcccagcatattggttattatctgttttttaacttcgtggttgtaggaggtgctcattaaaattttcactttgcaaacatttattccttgatttaactcaccagcacttcaagctccactactcagtgattcgctagaaaatgagtaaataatcatattacttgttttcattaatctttcttaaatgtatgtatagctcacatttattttgatgtttaatattaaagcatttggggtctttattcagaagtttactgatgtttttgaccagaaaaaaaaatatgccttaagaggtgggggcgcggtggctcaggcctgtaatcccagcactttcggagaccaaggccggcagatcacgagttcaggagatcgagaccatcctggctaacacggtgaaacactgtctctactaaaaatacaaaaaattagctgggcgtggtggcgggcgcctgtagtcccagcaactcgggaggctgaggcaggagaatggcgtgagcctgggaggcggagctcacagtgagccgagattgcaccactgcactccagcctgggtgacagagcgtgactctgtctcaaaaaaaaaaaaaaaaaaaatatatatatatatgccataagaacttaactcttgtttatatcagtcagtggtaaaatgggttttgtaatacttcatttcacttaaagtcacagtttccatgaacttatcaatgatgttaaatgaggacttattgtataatgcatttcattttagaccttttgagttccaggtggactaatattgggataaagatgaaaagacctgggttctagttctaaatccagcaataacttgataaatgtagatatcaattattatacttgctcttatagagatgttatgatgatcagtgaaatgatgctaaagtccttttttttttttttgagatggagtcttgctctgttgccaggctggagtgcagtagcaccatctcagctcaccacaacctctgctccctgggttcacgcaattcccctcccaagtggctgtgattacaggcacacgccaccacacctggctaattttttgtattttagtagagatggggtttcaccaggttggccaagacggtcttgatctcctgaccttgtgatccaccccgtctctgcctcccaaagtgctggaattacaggcatgagccactgtgcccagcataaagtcctttttaaaactgtaaaatagtttatacatttgagcattattattataagcttttgtttcttacctcagaagaatatattttcaaatgatagacttctgggacttttggtacaatttacaaaaccttttttgtattctgcatttacagtggactacctggcctgggcatggtggctcatgcctgtaatcctggtactttggaaggccaaggtgggaagattgtttgtggccagaagttcaagaccatcctgggcaacatagagagaccctgtctctacaaaaacattataaaaattagctgaacatggtgatatgcacctgtagtcccagttgctcagcaggctgaggtaggaggatcacttgagcccagcaatttgaggttacagtgggctgtgattacaccacagcactctagcctgggtgacagagcaagattctgtctcttaagaaagaaaaaaaaaaaaaggctaggcgcagtggctcatgcctgtaatcccagcacttttggaaggccgaggcggggggatcgcttgaagccaggagtttgatatcagcctggccaacatgacgaaaccccatctctactaaaaatacaaaatttagccaggtgtggtggcgcgcacctgtaattccagctactcggaaggctgagggaggagaatcgcttgaactcaggagttggaggttgcagtgagctgagactgcactactgcactcctgcctgggcaacagagtgagtgagacttcatctctctttctctctctctctctctctctctctctatatatatatatataaatatatataaatatatattatatatataatatatataaatatatatttatatatataatatatataaatatatatattatatatataaatatatatataatatatatatattatatatatatttatatatatataatatatatatttatatatatattatatatatatttatatatatataatatatatattatatatatataatatatatatatttatatatatatataatatatatatatataaagtaaaataaaagcaatactggcgccagtttcaagagaatgcccacccatctgttgcaccctttctgcaagttagagccattaagcggactttattactctcttgctttctcccagatttcccttactgaagccatttgtaaggatattataccttttaaaacacaaatatatcatacctggtgccagaaagttttttgttttccttaactatattggaaatcacctatttcccaacttgaagactttaataaatattattctcaaagaattttcaaatatagtcattccttggtgtcatgggaaattggttccagaacctccctcagataccaaaatccacagatgctcaagtccctgatgctggtactatatttgcatatgacccacgcacatccccctgtatgcttcaagtcatctttagattacttataatacctaatacaatgtaagtgctatataaatagttgttaacactgtattgtttgggaatcatgacaagaaaaaagtctagacatgttcggtagagacgcaaccatccttttttttttcacagaatattttcagcctgtggttggttgaacccatagatgcggaaccagggatatggaaggctgactgtataactttttggtaaactctaatacaaacttcacaaatgttgcaagcattttttttgtgtgtgtttggatctgtggatcaagtgaagcagacttgtacaaactccggaaattataataatagtagacaaagaatgatgtaaatggaaatgggaaagagactttgtctcagtgagaagagagtaggagagcaggatgtttagcaaggaatctccactccccttccagcccagtaatcataataaatacactgctagttaataaacaagttctgtatatgtggcaaaaagggtggcttgtggtggaaggaagggggaaccagccctaaacactaaacacttcttatgtaaccttaatataaagtaagtaaaaactccagatcctgtattcttaaattatagtaacatttcctacctatattaattgaatggaatgaccaaaattaatgaatttttatttttattgaagaattttgctgtatcacaaattgataccccaaattgaggaattttggtgtattgtaaattagatcatactagaatgttccatacagaggtcactgtagaggcacagatgacttctctgttattaggtggaacgatatgaaattggcatttttaataagttttttaaaagtctgatatttcagcagtttcacagattaatttatatatgccaactaaatatatagatggtaatctaatttttctgtttaactcagtaaaagtaaaagtcaagaatttataatccaaaagatgtttttgccttggtcaaagaaattttgggaatagtttataaaaagatgacagcagaggtcattagtgatttctgtgttagcactgtatttactccctttaaaataaaaattacatactatattgccttccaacacaggcattatatttcagtgtattcctttgccaaaaacaaagataaaccatagaacatatcagtaaataccaaccagctttgaatatgatcccaaaatagacaataactttttcttcagtctgctgtagagcttccaatttgtaaattaaaaacagagcttactgagttgccttaggaaagccttatttaagggaaaaataatgtttcctcctttctttcaggtaatttggcagcaacagtgtttttaagttgctgacattaactagctttgtggcagagtgggtttcagagtttggacttctttctaaatcaggctgtgatgtgtgaaaagttcctctgtaaacttactgagttttatttgtaatagaaatatacattcattcaatagaaatatagcttagatatacaatagaaaggtgactggggtccatagtacttccctgtgtattattgggtgtatacttggtttcttctaactttaaaaggaatatgagaaagatggagaaaatattttatatgtttcaatttgatctcaaattttggggagatttagtgttctctcagtttcattgactatttcttgaggttccagttgagtagtagcttcccaacaagatggactaacaggggtcagttttactttcctgcatgtagcaacaacagaaacagaaatcatatatgaaacaattgttttcaagtcatctgacattagggaatgaaggacaatgatccctgagagatgggaaacaaatgagacaagccctgcacttgccttagtttatcgtctttggagtttctaggctgtgttacagtaagggagaaagcaagtgaaacccagggaactccctcagttgaggagacagagctgagagtccagtaagaccaaagaagagcgggtgtcggcaaattaccatgtgcttttattgtaaataaagttttactggaacacagccacactgtttcatttttatcttgtctgtggccacttttaagctataatcactgagttgagtaacagtaactgagaccatatgacccacaaagcccaaaatatttactattttcaaaccctcacctagagtttgttggatgggatatcaggggagatcttcacagagaaaaaatgctgaagactgcagagggtccttttccagtattcaacagaatactggtgcctctgaggaaactgcagcctaggaaacaaccatctgagtgtcttagagggcacaatggtcacacagagtcaggactagtgacactaacagttactatgactgtattccatatgttcaaaaagttaagtagacttctcaattacttagatctaaatataaaaaactcctaggtgtgaaaaccacagtgtgtgaggagaaagcttcattgcataagactgaagatagattataaattgcagaaaagtaatcccagcactttgggatgccaaagtggaaggattgcttgaggtcaggagttcaatacctgcctagaaatagagtgagaccctgactctaaagaaaacatttgaaaaattagccaggtatggtggtgcatacccttaatcccaggtactcaggaggctgaggtgggaacattgcttgaggccaggaagtcaaggctgcagtgaaccatgattctgtcactgcactccagcctgggcaacagagcaagaccttttctcaaataataataataaaatcaataaataaattgcagaagaaaagattagtgaacttgaagatagagcaagataaagatcttgtttctaaaatgaaacacagaaagaaaataacttaaaaagagtatcactgaactgtgggaaaatatacactaataaacagaatttctgaagaaggggtggtgggacagaagaaataatagccaaaatatttccaaatttgatataaactataaaactgcagatagaaaaaggtcagtaaatcccaagtacaggacaccttaagaaaggcataccaaagtgtattataatcaatttgctcaaaatcattgacaaagagaaaaaaaaatcttaaaagcagccagaggaaaagacatgttacacaccaaggagcaaagataagcagatttttcttttcttttcttttcttttctttttttttttttttttttgagacggagtttcactcttgttgcccaggctagagtgcaatggcgtgatctcagctcactgcagcctctgtctcctgggttcaagtgattcttctgcctcagcttctcaagtagcagggaccacaggcatgcgccaccacgcctggctaatttgttgtatttttagtagagacggggtttttccatgttggtcaggatggcctcaaactcctgacctcagatgatcgtctacctcggcctcccaaagtgttgggattacaggcgtgagccactgcgcccagccagcagatatctttgaagtatggaaagaaaataaccatcaacccagaattatattctgcctttgccccctaaatctctgaagatgaaggcaaaatattagaaatctcagattcatgaaagcttaaagaagttatcagcttcatatgaaatgttaaagggagtccttaaaacagaagaaaactacgtcagcatgaaaggaattaagagcactgggaatggtgaaaaacgtaggtaaatggatgagatatttttctaatttgtaaaaatgtaaataattaaaatttaaaatataattgacttgttttaaaatattgactgttaacagaaaaaaatggcatattgtttttaatatatactgtgtgtgtacctacgcatgtgtgtatatatatgtgtgtacacagtagcataaaggccaggggggtgggaaatggaactatactattgtaagatttttgtaatatatgtgagtggtataatattacctgaaggtaaactgtgataagttaaagatgtacataatgaactcaaaagcaactactaaaataacaaaaacaaaatgttgtatctaatattccaacaaaggaaataaaatggaaacaagcaagagcatgtaattctaaccatatcaatactcattagttataaacggacattctaataaaaaatgagattgtcaaattagatttaaaaagtaagttctaactgtatgctacttataagaaacacactttaaacttggaattgctacattaatatcagactaagtaggacacttcactcaacagcagaatacacattcttttcaagtgtgcagggaatatggaccaatatagggaatcttctcggctctaaaacaaatcccagtaaatttaaaaggtttcaagtcatacaaagtatattccctgaccacaagagttaagtaagaaatgaattacagaaagatctttggaaagtgcacaaatatttggaaactaacacacttttaaatagtccatggttcacagaagaaatctaaagggaattaagaaattatttttgactgaatgagattgaaatcagatatacccatatctttgacaactactcagatttttttacaagtggattgagctattaatacttgggacacgtttgatgaccctcaagaaaattaaaagcccatctccaaagtttccacactgcatgatttcatttatataacattctcaaaatgacaaaattatagagatagataatagattagtggtgcccagggattagggatggggtgggagagaatgtggctatatagagttattacaaggttgatctttgtggtgataggacagttctgtatcttgattgtagtggaggttacaccaatttacacatgtgataaaattgaatagaccctcacacacataaattgagtgtaaaactgtatatgtaaatttcattatatctgaataaagtctctggattgtatcaatggtgattttctgattttgcaactgagtgaaaggtacacagagtatcactgtactattttgcaactttttgtgaatctttaatcatttcaaaataaaaacttgttttcttttaatggtgatagggtcttactctgtcactcagactggagtgcagtgtcttagtcatggttcactgtggcctccaactcctgaacttgagtgatcctcctgcctcagcctcctgagtacctgggactataggctcgcaccatcatgcctggctaattcaaaataaaaaccttaaagaaaaacaggaaattttgtgagatggcactaaatccatactcaagggaaaaattatagggctaatgtttatattataaagggaaaagatctgaaatcaatgacctcagcttccacattgagaaactagacaaagtagaggaaattaatgcaaaacagaaaatacaggaaaaaaggaaaaagatcagagtataaaatcagtgaaacagaaaacataaaaacaatagagaaaaagcaatgaactatggtgtgcttttcttctgcttggggtttatgggattcttggatctgtaggtttgtagttttcatcaaatttggaaatttttatacaattatgtcttcaaatattttttctttcactctctctgtcactttcccttttttggaccccagttttatttacgttgaccacttggtactttcccagcttactgaatttttgttaagattttcttattcttattttcctctctggttttatatagtttttaattctgtatctgtaagtatattaattctttttctttgtgttaatttcattcaatgtattttacatttcggatatcataatttttatctcttgaagttccatttggatcttctttatatcttttattttcctcttccttatctacatgtttgaccatatggaatattatggaaccataggcagcacgacgtgttagaaggcagcagatgagaagtaaaagcaagtgattagaagtaaaagcaactagtacagaatttggtgtcatggaagtcataaaacaatactttgggaattagaaaagagaatcatgagttgaattaataactataaaaagtcttactgtaacctgacttcgaagtagttgtgttcctttgacaaaatcttagtttttattatgctaaagacaattaagtctgttgtgagtttctttctttctttctttcttttttttttttttttttttgagacggggtttctctcccattgcccaggctggagtgtagtggcacgctcttggctcactacaacctctgcctcccggatcaagtgatcctcctgcctcagcctcccaagtagctgggactccaggtgtgtgccaccatgcctggataatttttttatttttagtagggacagggtttcaccatgttggctaggctggtcttgaattctgacctcaagcgatctgcccgcctcggcctcccaaagtgctgggatttcaggagtgagccaccacgcctggcctgtggtgagtttcttctgaatagctgggctgtctattgatttataggctttaaaaaatatgattgctttactaatctcttggccttcacttacattttgtttggcatttacatacaataaagtagataggacttaaaagtggtattgagctttagtagaggagtactaaaattagtagtcagcaacatgattaaggttaaattctagggatcttgattcccaaacaaattttgtactgctggcatacaaatcacaacattgagactagaaagagccaatatttttcattctaatataaagccatgcatttgggtttagaatgaagtcattttaaaagattttactatcctgttgtttcatgagttttgagtccaatgctgatatgttttgtgcatgttgctgttatcaactccactccctgctgcctataaaaaggacaacgatacaaaaagttaaagaaattattggtgttttctaccgtggatattgtcagtgccctggaaaagcaattaaatatgcagcaattttcttatgagctgctccctttcaaatgtcacattagatttaacctaacatcctggattgcattgctgttgtggtatgtgtactgtacatggtggaggtactcaacaatatttccttgcattgtccataataaatatttgcccaagactgggtaggggtggaaggggaagaaagaaatgtttttctcttgtagaggaaacttgtaatgtaggacttatttaaagagtgtttatagtccattgttgtccatagggtgtgtcatactgctctctccaggtctgaaaatctgggatagttaaaatttcacttatttacacttaaacttctcagttgacatatccttccatagagaaatgatttcagtgagacggtgtttttctttaagaaactaaacatttgagacatttagaccctgaatttagccacatgtatgttttataacttggggaatattatgaaattaaagtttcttgttcactgaaaagatgtcagatagctgaatgaaagtaccatcagcaatctgcaaacattgtaaatgatggacttaaagtttgtattagatttccctttttgcatttgtgttcattggttacctacttctccatctcttcgcatagatcttcagacctgtacaatagagttcattgagtttttctgtcattgctggtctcgagatgtttcaacattaaaagttctttccattacaacctaatgatctgtaccctattctgaagctaatcttggcattttctgtcatttgctttagtatttaccagttggggaaaaaaagtgtgcgtgtcgtaccaccatcctgtcataattctttttttttggccagggggagacagggtctcactctcttgcccccaggctggagtgccgtggcatgatcacagatcactacagcctcaacctcccaggctcaggtgattctcgtgcctcagcctcctaagtagctgggactacaggtgtgcaccaccatgcctggctagtttttgtatttttgtagagatgaggttttgtcatgttgcctagactggtctcaaactcctgggctcaaggccagggtcaatccacccacctcaacctcctgtagtgcttggactacaggcatgagccaccacacccagccctgtcataattgttcttaatatagaagtgaaacaaaaggaatgtctctataaagggctgctttttactttttaatgtctttattttacagaattctatgtgatagtagtatctcagtgttccttcagattgttgtatgacttgctatttttcagatacatttgagagtaagcattttttccactgaagctagtcatatttattgcactggattaacaaatttggctgggctaggacattgattctgatagattaaagaaaaagcatctattggttgtaaagcctgtaggctatcagaactctgctcctgatgtcatttatgctatctcacgtaagtttaaggttatttacatacagatactgatatccctcaatgtgtggttttatgattgggtagtggggataggggatgcaggatttggatatatgtttgcccttttcttcaaaaaatgaggagctaaaatagaatggtctgtctgtgcttacctgcagtaatgtaatgggttgatattggcaggagcttgtgggttgatgtggcatcacttccatcactacggttaattgctaataaatgactgactgggaatttaggaggaatgctacaactgtctgctgtgttagtggtaacaggaattctggcgccatttcagggtgactatttgtatttgtctatcagagttagaatacagttgtttctctcagtttcagccttctctatagaatttctgtcaattgtttgactccattaagtgtgcagaggaagtaaaagcctgaatgaccaatccaccaggggctatggatagaccctttctttgtccatactcagagcactgcattaggtctcattatccatttataataagtgacctctgccccctgggtcattgaaaaatattcagtgtgcttttctgacacatagggcacctttctcagcagacacatgaaacaatgggacgtctggtagtctggagaactggtatacattgcaggttttaaaataaatacacagccttgtgccaaattactcttctaatttttttttctctgttcttacatggtttataaatgggccaaggggatcctaatgtctggaaaataaatgtattccttatctcttttctttcttattattctagttttaaaaaattgccgtgtttttccatttattttctagaaatgatttgccttcatctctgattttgcatttcctgatagagaactatagaaagccttggatatagtgaatggagagagttaccgtctttcaaaagtgtttgccaaatctgctcaggatggctctggaggttatctgtgacgtgctcaaaacctgtcttcttctagccctctgttctgcccaaactggtagtaaccaggctggaaaaggatttgacccttccttggtcactgcattccagatttctttcgtggtataaatgtggaccacctgccagaaagctttgcgtatgtacttgttctgtctccagctccaagtgtatagacagacttgggaagagatggagatagaaattgattagtggccaaaataaagatggaaagtaagaaaactgtcatgtccagagctttacatggtgtcaactgaaggacagccttccgcgagttggagtcttgaccaccagtaactaactgtgtggccttagtacagtgcccatgttatatactgatagaagtcagtaatttacttgaaatatgttgggacaggaaaaataaaagactgagaaccacttattttgcaagtcatatgaagaaacgttaagaggcaaattaaaattttaacttatactttattttaattaaagtatttaaaataaatttataaagtataaaaattcttttatagatattttttaaagtttaagatgcaggctttgtattaacaaagccctattccccttagaacttactgatgttgtgtttattgttatatatactggcttgtttattttattaaaaatacatgagctacacagagatttgaagaaactcagtttattacactgaattagctgccatcctgtccaggagacccaggggttttattataacaaaatggttttcctattaagtgatgtactactgcatgctctcagatattgagacacagaggtgttatctccataaaaatgaccattgcatccatgcacagattttttctctccagttatggaaaacctcatagttgttagaactctctccatgacaaggattaatatattaactggattatagcactgtttgacaaattgctcactaaatacatcaaaattgattggaccttctttatttgaattgacaaatggctgcattaggagaaggagggaaatccattaattatagctgctctcgaccataggaaatgtaatcatataaatatggattttgctaaaacaaaaatgtcttctttatggtagtgttgtttatatgtatatctgcatctctttgccattaatagaaggcctgtgcttacttaccatcttttaaataataaaaaattgatttctgtggtgttaaaaggtgtgttctaccctctcctgactatataatagttttttaaatattccagaaaatatcagggaaaccctgtagttcagcctttctgctcagttttcaattgcacctctatttgtccatcttgtgcttctatgttcattgatttcccagataaccttacagatttgtgactgctccagtgtaagtttatatatgacagggcctttacttaggaaacaggaaatccagacactgatggttttgacttccttcacattgttaccttgagtgagtcattgccttctacgcctcaggtttctcatctttataattaagggtgtgaaaatctttttcaactttcagatttggggagatccctgccctagaatctcgtaacttgtccagaaactcatgaaaattcagacccaagacatgttaaaagaggaggaaacaagcagctaggacacctgaagtcaaggtctttgtcttgttacttttttttttttcacattttatgtagcaacaggattttctaatagtttgcaaataattcctgattatacaatagtagaaacaaagcagcctgtgctattctttatggaaaatgtatgtttcataaacatttttaagcgatctttttgaattatttcttatttccaagaatacctagaaatcccttctttcttcaaattaatgtatatatgattttagtttttcctatatgttttaatactttgttttaaattatagtcttgtgtctttagcatagctactttttttttatattgaagcctcttttagctgctgattatgaagctaacatatttaatattatttttgtttctggagttctgactgttccatttatcaaaagttttaattttgctttgatagtgtataagctcttatcattactgagtttctctttctttgaaaaaatttttctctcttgatttttcttactgaaagtaaccagcccagtaaccgaggcataaggttggtgggtgagtgccacagattgtctctctgcagcttcagtctcttcttccccttattgttgtcataggataggagacttttggccatatgattctgtggaacttggcaggggaccagaaacaccatattgccttcagtgcctttatgccatcagtttcttgtcttttatactacgctttctttgtattttatgactttgtgaagaacatctgtaacaaccctatatgatgtgaaatctggtcaaagctgagatttggggattttttgaggatagcgtttttttcttttcttggtcactcggctgatttctgtgctcttttctagatgctagcatgtcatccgtggttgcatcatgtacacctttaaatatgaaaccaacaaaccagtattttctacgatgaaaaattttaatcagaggtattatagtgtatgtaaagtagcactttgattgtttctctcactgcatgtgaagcttccttcaatgtctgtaaccttgtgttgtgacttctggttaaagtaatttttccccattgtttgatcacagtataggtatctctgatcaggatacataactgtttattatgattatagaaaagattatattaagtgaagcagacattgaatagacaaacaacagactctcaatcaatgatataattgacgtttggggataaaaatctcttacatgttttatatgataaatttaacttaaaataatgaacttagtaggtaatgaagtgataaattgaggtgaggtgattttgcttaaggtgaagaatgtgatctttagagtcagcagtcctgaatttgaactctgtctctgctacttgctatctgtacagctttaggcagataacctccccgaactcttttttctccccatctttttttttttttttttttttttttttttttttttttgagacagagtctcgttctgttgcccaggctggagtgcggtggcacaatctcggctcgctgcaagctctgcctcctgggttcacaccattctcctgcctcagcttcccgagtagctgggactacaggcgcccgccatcacgcctggctaattttttgtatttttagtagagatggggtttcactgtgttagccaggatggtcttgatctcctgacctcatgatccgcctgccttggcctcccaaagttctgggattacaggcgtgagccactgcacctggcctctccccgtctttaaaatgggtattaataatacctaccttacaggatcattgttagataatatgagataattgatccaaaaaggcttacccaagagcttggatagaaaaaagaaactcactaatgatagctggtggttgtacttagttgtgtgagaatgaatacccttcttccgtgaggtctttcttgcttctcatgattccacctactttatgacagatactgccaggtggcacaggtgaacatactttgttgtgaagagaaagcgtttgtattatatctcctctgatcttcagtggtcagctggacaagtatggctctaatattgggcacattttcaaagctatagaaagaaattttactggctgggcacggtggctcacacctgtaatcccagcactttgggaggccaagttgggcagatcgcttgagtccaggagttctagaccagcctggccaacatggtgaaaccctgtctctactaaaaacacaaaaattagccgggcgtggtggcgcgtgcctgtaatcccagccactcgggaaggctgaggcaggacaatctcttgaacctaggaaggaaggaaaaaatgagtgggaaagagagaaagtgaaaatgaaagaaagaagggagtgaggaaggaagaaaatgcaggggaaaagaactacctcactttgttatacaagatgaaaataaaatggtatacagtaatgaaagtaaaccagacctaaatatattttttttattatttttatttttattttttgagacagagtcttgctctgtcgcccaggctggagtgcagtggcgcaatcttggctcactgcaagctccccctcccaggttcacgccattctcctgcctcagcctcctgactagctgggactacaggcgcccaccaccacacccggctaatttttttttttttgtgtatttttagtagagacggggtttcaccgtgttagccagtatggtctcgatctcctgacctcatgagccaccccgcttggcctcccagagtgctgggattacaggcgcgagccactgcgcccggccaccagacctaaatgtattaacatggatgatacatatagtgttatgtgggaaaaaaaacctgttctagaaaagtattactatgattttttaaattatcactcactgaatgatcctgaatacttcatgtattccacaccctagccaagaagagtcaagatgactctctgtcagtctgcaggtcaagaaatggttgttcaatcttttgaaacattcataaaatagtttttaaaaaaattattggagaaacgttagacgtacatagtacacagttagttgtataaggaatctaccaattaccaagtttcaacaatttacaacattctaccacaaagtatcctaagaaagtcattcactattgtgtctttttacccatgattcttcactatacatctgattataaagactttttaaagatcacaactccccaccattacgtaaaacaggtgaggcagggacagtgatttgtggagatctctgtttagtagtttgacgttgtggagtaggcaaggaagatcaagcctggaaaatgctcttcttacttttggaaagttaaagaaaaccctgcagtagttgtgggcttgtgttctctgtctcatgctttcccctatcctctcggttttgagaattttctgattaatttagagttaaaatatggaaaacatcatgaatgcttaatgatcatttaagaagattttagattattttcctaactatagggtgaaaatgtttggtgccttccaggtctaaaagcttttgtctctccatgccagggcaactttgcctcttttgcttaggcaagagaaaatctgtatgtaattcttcctgctgcataatgatgtggattttcctagtatgtaactagataataaataaatgaaacatgaaaaaaccacattaagtctttgcaaaaaaaaattatttttgccatttttacatttgcaaacatcaccccccatcctcgcctgcttttttgttgttgtttgtcagggcttagtgtagatgctagactgaatactacattagagcctttgctattcaactgtgccattgtagatggagtcaagaacagtaagttttcaatcactgtcctattgcctacatgtacagatgggtacatcgattactgcacacaatttaatgaccaaaaatagtgattatttacctttacaacatcaatttacagtaggttccatatatgctctactcatcctagtatcttatcaagtatattttagagtgttccttgaatttataatggagaattgattattcctgaaagaaatgcatctaacattcaggtttggctgtgagaataccgttgctactgttgaagcattacaactcataattctacacagaatttagcttaggatgctttcagcaaataatcattcttctgaacaaaaaaacaacgtgtttgagcagttgataaagctggtcctatgtttgatatttgtgtgtataaatacagagataatgataaataaacagatacggagacattatgcataagcaagttagaagtagcacaccccctttaaaaagttactgaatctaaaaatagggggaaaaacacataacccactatgcaataaggtcaacttttattttgtttatcgttttccaacttctgttgatatatatctgatttgtttgcttgcatatattgactatggtgtgctgcaccatctgtatcaattgtattgttcctattccacaacttttaattaaatatgaatttttatatcatgtttattttataaacatgatatacacggtttaaaaggtaacaaaaaatatccagtggaaaataaatcctccgtatctcccaactaacctcatcccctcccaggaggcaactactattagtaatgtattgtattctatactcctgtaaaggtaagctttaataagaatgctcttattgttacatatgagtctggccagattatataacccatgataagacaacagttgttattcacaagctataagcaaggtactttatagttatgatacaattctttaaaatagtgtggacttacttttccagctatcctactgttggtgatttaatgtacatacagtgcagttgtactatcaaatgagttgcactagtgtgagttctagtagaacacattaagtagatattgtgtgtgtctctccaggtagatatgaggggacttcaaaaagtttgtggaaaaagggagttaaaagatacaaattaaaaatataaactttatttctcaagataagccccatcaagttaaagatatttttgtaagcgatgatactagccatttagtccatcctaaaaactgaaggtcctgggaatttaattatgtcaatgctgtcttttttacattaactaaagaaaaatggatgccctttaatgattttttttaagattagaagcaaaaagaagtctgaaggagccaaatgaggactgtgaggtagatgcctcatgatttcccatcaacactctcacagaactgcccttgtttgctgggaggaatgagcaagaatattgttgtggtggagaggactctggtgaagctttcccgggcattttcccaccaaagctttggctaattttctcaaagcattctcataatcaacagatgttattattttctttggccctccagaaagtcaacaaacaaactgcctcaagcatcctaaaaaactgttgccgtgacctttgctcttgcccacttttgctttgactgcaccacttctgccttttggtagccattgctttgattgtgcttcgtctcttggatcctactataacagtaaagccatggtttatttacagttttttgtttttttgttgttttggtttttttttttgaggcagagtcttgctctgtcacccaggctggagtgcggtggcacaatctcggctcactgcagcctttgcctcctgggttcaagcgattctcacgcctcagcctcccgagtagctgggactacaggcacctgccaccacgcttgctaattttttatatttttagtagagacggagtttcaccatgttagccaggatggtctcgatctcttgatctcgtgatccgccacctcggcctcccaaagtgctgggattacaggcatgagccaccatgcccggcctcctgttatagttctttgaagaaatgcttcaggatcttgtttccacttgattaaaatttccattgaaagctttgctgtagtctgcagctgatctgggtgcaatgctttaggcacccattaagtgaaaagtttgctcacctttaatttttcagtcagaattggggaagtggaaccaattgagatatctttggcactggctgtagtttctgctgttaatcattggtcctcttcaattaaggcacaaagaagatgaatttttttcctatcaaattgatatggatggcctggccactgaagacttcatcttcaataccatcttgtcccttcttaaaacgaactatccatttgtaaactgctgatttctctggggcattgtctccataaacttttggtaaagcatcaataatttcaccattcttctacccaagcttgactgtaaatttgacatttgttcttacttcagttttccatgaactttttgaagacccctcctaaactccaccttgtccttaaaatggtttgaccttgcaagtgctttgagaggatggttatagtctgttcacttcttagaagtatattagaggctgggtgtcatggtatacacctgtagttccagctcctcaggaggctgagacaggaggatcacttgaggcccaggaattctaggctatagtgcactatgatgatcatgcctgtgaatagccactgcatgccagcttggtcagcatagcgatacctatctcttaaaaaaaaaaaagtatacttggactgtttgaaatttttccttagtagagtaactgatctggctgatagcatgaacccattatgctttattctttctctccattttatgagatatttagggccactaagaagtaaaactaaattgtgagcccagccagactctccaggggtaatttgtccagatgctaaatgtcaaatgacctcttggtagcaggaacaataaatgaaagctccttagtttatgtcttctgtagtaatattatgatactgtgggggtacagaaaaggagatggggagaaaagatgcacccagagttgtcagtttttcagtgaaatctattagtttatagacagagaagatatatactttttctaattatatattgcctgtgactgttcttctgggaatgtgacataaaaggaaagtgaaaccagagatgtacaatactgactgttagaaaactttaataattaattagagaacatctatggtactacagggtcagggcacaaggaagatcattgatccctataatatataatgtagataaagcttgttcccctttatgtattgttgttgcattggtatagggatggctgctaatcaacagaacagccagtgatattctgtggaattgctttactgctctgtgtattagatttagtgaattcctctacatttaaattgtcacatttataaatcagtgtgaatttaatactacccattttcaagtagttatgtgtgttatttttaatctgaaagggttctccctttttttagtcatttaaaaaatcacactttaatttttgccactttgatatgtatgcaatgataacttgaatcattaaatctccaattactacgatttaaatatgtttgttggatattataattcctcctctgtgaattgcttgttcattgggaactgcctttgttcattttgcttttggattatttgtcttctgaacctttgttttaaaatggcaaattttagtttctatactaagaaactacattcccaagcagaatttcatccttatatcctgagtgctttctgatcagaaacagagtttggtaaatagcccttgcttattgtatggctgctatataaatgctgtttttaataagcaccaaaaatatattgaggtttgtccttgggagagagtttatcactgttggcctttgggtgaactttgagcctgagctgtttcattcaaggcagcatgatgtcatttaactgcaaatttctctgttgctagaaaaaggaatgttgttcctctaaataacctaaacgactgaaaaatgctggcacaacattattcatctctcaggtctccactaaaaactttcacgtgctaagggttttattgtttgtggaggaagggtggggatatggtaaagagtaggagaaaacaaaaactgtgtctggtcctgaatctgaagaattccactgcccatataaaactcagctgccagtaggacccagtaaactcacttgtccagataagagcttttgggtccatctttgatttttcacttataaatcagtgtgagttttaaatttataattaaacttacaaatgcatttaatcttcatttatagatcagtgtgaatttttgaattaagagactctaaatttctatttctatatattcagcctattatcatattttaagtttccaacaaaatcttaaagcaggtaactatatgattatctcacatataaaactaggtaccattagggtcagcatttttatccttaatttgagaagcagatttctctgatagtgatagcattgcaattaatttcaaggagtagaacagcttcttaacatctgctagagttgggaggctggagtttacaaacagtggtacctgtagttgatcagctatgtcctctaaagcttccagagctacagctaagagaatttattactggaaattcaagaaatgtaggaaagggtagaacaagaagaacaaaaccaaaccaaatagacttttccttcattactttcataaataagcactgctcgatgttcattatgctttgtgcttgtttatataaagaggatgcttacaagctgtgtgtagtcttttaacttttacatgcgttggcagttgtttttcattgctttaaatgaaatggtactggatacagatatttttatttttattcttgctttacaaagaaatatttaaatcttataaacttcatttttacaaggtctaatttttttcctgagtatcttaaaccatgtccaatataatgagagtaattaattacctgctctaatgtacagtatatttaatatgttaatgataaatatcttaccttttgtattctaagtagaagactagattagttgcagatgaacttttttgatatctagctgtttctctggggatattttagaaagaatttgattccataaaattgaggttttcttctcattcttttgggggaaaaattgaaatgttaggtttaaatttttctaggaatggtaataactcattctcggaatcctggttcaaattcacctatcctaacctgtattaagtagtgttaaagaactagatatttgaagaaacttaaggatgtcaacttagaggtctgttaatgtttatacctttaatcttgcaattattatttatatactttaatactttgtacctatagtttagcagtatgtaaagcaacacttttaactttctctaaccgataaataccatattttctgtgggtaattttttaaaattctttacacattgattcttgtattaagttgcagaaggcatctaaaaattcaaaaatagaactcttctaagattttgatttgaaaagttatattattaattgactttttggaacattgtgaattttattatataggattcagacctaaggatgttattaaggggacattaatctttcatttcataactttatttatgtgtgtatgtgtatatatatatatatatatatatatatatatatatatatatatttatacagacttggcagtatttttggtttagattaacaggactaattttcaaaggtcagccctaaagcagattggcttttgtttgctttacacatactcacatatgaaaatatataaataggctgaacacagtggctcacacctgtaatctcagcactttgggaggctgaggcaggcggatcatgaggtcaaaagatcgagaccatcctggccaacatggtggaaccccacctctactaaaaatacaaaaattagctgggtgtgtggtgcgcacctgtaatcccagctacttgggaggctgaggcaggagaatcgcttgaacctgggaggcggaggctgcagtgagctgagatcatgctgctgtataccagcctggtgacagagcaagactccatctcaaacaaacaaacaaaaaaaaaaaaaaatatatatatatatatagaaacacacacatgtatacacagaagcccatatattcctataagaaaaataccataagtgattttttagctcttatttactcactataagcatgatttgcttataaatactaaaaacagacaggctcacagttacctcataatgatctactcatcctgcctttgctcgttgatgtatatttagcaaaagcctgtgtgtagaggcagtacttttgaagttgtattctctaaagtaaattgatagtattccctattcagtattttccttttcagtttggcagataaggtgtgtttgaaaattactgtactaagaacatggctagatttatatccttgtaccaagtttattaattatctaaggacagttggtaaatataaaagatactaaacatttttctttagggtagctattttgtatcttggtccattgaacttggatttgcaagatatgtaactttatttttctttaaataaactctattaagttttttttagtacctccattcgaagaaaggtggaaaaattaatctcaatcaattataccacctccaaagttacatctaaattctctagggtgttcagggtataaaagtatgaggtaagggatttggggacattttgtcctaattgtcaccactgacatgtcccatttccccaccagatcattggccattggttcatataggtctctgcagcatccattcttgtttctcatccagctcctgtcagttgtctggactatgtccatattattcttgtacatgtatgaaacattcttctcctctaagctatggagaacatggtaaggttgtcacagacctggctgtacagacacactatgtgcacaccatttctactcttgtaccatgtgggatctcttgccacttcccttaactctgcccaagattgaagacataagttttcaccgccattggtccctaaaacttcttctgggattctgtcgtttcccactcctctttgtgaccctcttttttcccctttctgtctctgccagtctcgctccaatctcagggtatcattcctaatatttgagtggttagaagcatggaaactttgctcttatcatattttctttttatcaaggttgtaaattcttttttccatgtgaacaggtatgtcattccttcccaaggtagtaaacatagaatgttcttcctacctggattgagagaaattttttaatataaataaatgcaagtggtgaaataaaatggatagactttgtcagaggagcaaaagagaggataattctatttaaagaaaaagccaaagaagcattaggtaaagccaaagacacaaataatggtaacccacaattaaaaaacaaaaaaccaaagaagtgacttgggaaatagtagaaggagagatgaaaaagaagcattgaaaaaaatcatgcaagaccaacaagaatccccaaataaatggaagtcaaagattgcagatttacaggaaaagggaagagtaataaagctacccagcctgggtttgcgatagggaaggtacagtttcagggcaggtaaactaaatttgatagtgatgatgaatgtgatggagaatggtgcaactgagccaatgaaaagagcaaaagaagaaacaaagaagaacctgcgccacaaggacaaaaaacagaaaatggtgccagagaccagtagttgagtgcacagatttttaaattcattttaattaggttttaagctgcttttgttttgggacttttaaaacaaaatccaaattaggcctactattcaatgtccacctgcaagaaaggaaaactttcaggccaggtgtggtggttcatgcctgtaatctcagcactttgggaggctaaggcgggtggatcacttgaggttaggagtttgagaccagcctggccaacatggcaaaatcccgtctctactaaaaatacaaaaattagccaggcatggtggcgcacgcctgtaatcccagctactcaggaggctgaggtgggaggatcgcttgaacacaaggtggaggctgcagtgagccgagatcatgccactgcactccagcctgggtaacagagtgagaccctgtgtaaaaaaaaaaaaaaaaaaaaagacccttttcacaagatggcgccgaaagcgaagaaggaagctcctgcccctcctaaagccgaagccaaagcgaaggctttaaaggccaagaaggcagtgttgaaaggtgtccacagccacaaaaagaagaagatccgcacgtcacccaccttccggcagccgaagacactgcgactctggagacagcccaaatatcctcggaagagcgctcccaggagaaacaagcttgaccactatgctatcatcaagtttccgctgaccactgagtctgccatgaagaagacagaagacaacaacacacttgtgttccttgtggatgttaaagccaacaagcaccagattaaacaggctgtgaagaagctctatgacattgatgtggccaaggtcaacaccctgatttggcctgatggagagaagaaggcatatgttcgactggctcctggttacgatgctttggatgttgccaacaaaattgggatcatctaaactgagtccagctgcctaattctgaatatatatatatatatatatatatatatatatatcttttcaccatttaaaaaaaatagaaaggaagcttttttgttgttgtttaacttgtcttttttgttattcacatgagaatttttttgaatgtatagttctatttgtgtaatttcagatgattcaatatcaaaaggaagattcttccatgaaattgcctttgtaatataagaatgtattagtacaaactaagaaaatatatgctatataaaaagagcaaaaacttagtttatttttacctttttgtgcccaaagcatttgagaatgaattttaaactagaatgttggctattgattatgggcccttcccacagataatttatcctgtctcctaggctggccttctgtatttacacaggcagcctggtaacattagaaagaattacttgtcacaaagcttttcaatactatatgtagactgactaaaatcaagagacttactgatttctttgtatgaaagttgtgtgacgctggcaggtcatatctgtaaaacagaagccacctaaggtcatttccaaacacttaaccacctttgactaaaacaacaacaacaacaactacaacaaaaactaagaaaagtattaaatactggtaagctgaacattttagatctgtccctttaacttatgcatatactggcttgatatgtcccccaacatcagccatggaaaacagagcctggctcttctgctataatggccatttatactgaaatttgaggttatagtgaagaatttagaaggataacaagtggacaaaaaaagtaaatcctatgaaaatgatagtacctttctattttaaatttcctaataatttatagctaacttaatctcataataaccatgcttatttcagaattttcttgtctagattttagaaatggcaataagtaactaattattttcctcctaagctctcaaatgaaaaccagtttttcatattttttccttttaaagaataatgtagattctccaaacttttactactgatctattttagaggaatggcagtgagtctactcctgtataatgcagctctcaaattttaatgtgtaataaaatcacctagggatcttgttgaaatgcagattgtaattcagtagggctgggtgggtggagcctgaagttatttatttctaacaagctctgcgagggatgtcaatgttaatggtctgaggaccacatttggaggaacagcgttctggcttggtggtatactgttgggactgttctaaggtattccatactacatattgtaattcctaaaactgtatagagaatccaatactaaatataataggaagaccaacagattttaataaatatattacattaccaattattatgaacagtaatatatctagttgtatgtttaacaccacagtgccaattaatgattaatttattgtgaaaaaaatatgttctcttattgcactcttctttcagacttttcaaaattatttggattatagttagcttctaattataagcttttcctgttttgatgtttgtgcttttacccaatttagtaataaaaatgtatcaaacatggaaaaaatggtgaggcagaggaaggatatttatttgataatgaaaaatattatcccaccagatttattttttatattgcccatcttctgatggcttccaagtatgcttaattagaaaactatttttggtgaaaaaaggggatggaaattcttataatctctttaggattttggggtgcatatttatggtactatttctagatgtatatttggaatctttattacttcctttggaaagttaatgagggcagagaggatctttctcccttctcactgtggaaaattccaaacatacacaaaactagaaaataatagtatagtgagcctccatgtacctatcagccagctataacaatgatcaactaatgaccaatcctgttttcatctgtaattctacctcccaccttcatccctgcactgggttattttgaagctaatcccagacattataatatattatccctattttgatgatggataaataagtgtccagccattctagtgccgttacttacttagtacagaatccaaaactccaaccacccagtaaatacttattgagtacttgttctgtgacacgtactagtctaggctcagcatatataaaacacaacataaacttttggagaaattcacattaggtactagctagttacgtaaggcatggttactcacttctacttaaaaattgctaattgctttccatcatattactcgagctttattaccaaaaaaaaaaaaaaaaaagaagaaaggaaaagcccacagtaatctgctggtcctacttcctttgccttactgacttaaccttccactcacaacatggcttatcccacccaaccacagtggcctcctagctgttacttattccctttatgtttacatctcaaaatctttgtacttaacattcccttggtcacacctctccttcagatatttgcataacatattacctcacctctttaaaatcttctctgccctcatctgctttccagcctctacatattttccatattcacatttttcactagtatttaaggggtgggaatttcaaggatcctcttgttctcttctgtattaagaattaatatagaatttagtggtgggaagataacttagccttttgaaaatatcattacttatcagcctttcaatgtatatcaattatttccaaaagaatgctgaaataatagttattgtgatattcttttcttcttgatataatttgtcatcacaagaatgtaggtgtatgcttttgtgatcatttgtgttttgtacaaatgccaccatgccgcttggctgtagaactatgattttgaagaactagcagctaaaagttttgattactgcagatcttacactttaatactgtgtatgcctctgctgagtaattcactgaattagcatttctcctcttgcagcaagttaagataagctttttgtgagtctgtgtcttttaaaatcttgccctaggttatgctttgtctactttatttgtatctgtttcactaagatacagtttttcaaaatactaccttgttctagcaagagctcagtgaggttggcattctctttcactgcttgggtaagtgtataactctttctgggaacatatattaagaaatttatatatttacatcctctgatttcatatgtaggaatctaactcaaggaaatttttgtatgttgatgtgtatatataaatgtcttttggtggtagaaattatgagggttttcagcttctcattcttttctatttcttccacacttctttaatgatcatctcttactttcttacttttctttctacttacctcccctctttttctctgttcctcccagtacttcattgcttgatttctctgagtattaaaatggtaggccaggcgtggtggttcatgcctgtaatcccagcactctgagagccaaagccagaggatcacttgaggccaggagtttgacaccagcctggtcaacattgtgagatcctgtctctacaaggaagaaaatattgggcaggcattggtagctcatgcctgtagtctcagctacttattagactgaggtgagaagatggtttgagcccagaagtttgaggttacagtgagctatgatcatgccactgtaatccagcatgtgtaacacagcaagatcctatctcttaagaaaaaaaaaaaaaaaaaaagattaaatacaatcatgtatgaggttggggggttatatgggaaatatccgtatctttagctcaactttgctgtgaacctaaaactgctgttaaaaaaaaaaagaagaaaaaaagaaaaaaatacctttagagacatggagacagacagagtgagtgagtcgtagcttccaaagaagagactaagattttgaggagataatatctggttcatattaggaactcagtaaatatttttgaatcattgtattgttttactaagcaaatgttcctatttgaatgaaaaagtaggctgttgtaatttgactatgtcataccacttaagaatcatgaaaactactcaggtatctaagaaagatgatgtatttctctggataaatgaattttttttaggactgaaagcattttttctattaagtgtgcatgtttatgcctagcatttatatgaagctactaaataaactcttttaaagaatcctaatgtcatcccccaatgaatagatttgtcgctgctcttcagtgtacttttgctattagcatatgtagttagttgtttatttcttttattgcaagaagatggcattactaaatttctgtagatattttttaaagtatcttattcctaagaacttcattcttacttgttcaataattgtttgaattgcctttttgctttaaagtattatattttatcttataaattaccatagtatccaaaatggttgtgcccacgtctgtttttccactgcatggaatgaagtggtttaaatctattttctttctcctatagtggttccccctggaagtcctgggcccattactcgacatgggtcttacgacagtttagcttctgaccatagtggacaggaagatgaagaatggctttcccaggtaaaactctgaaatattgagagtattaaagtaaaataaaacagaaatttactgtttttattcttttccttagaggtaaaaggggagaattggtaactctttattggattatcaagaattagttgtctttccatattacaaattactccacaaatattgctgcaggtgtacatatacatattatatatacattatacgtgtgtgtatatatatatatgttagcttccataaacatggcataaaatttgtgtatttttcacacaatccatttaaagccttagggccttggaatcaattaatttattaatttttgagacagagtcttgctctgtcacccaagctggagtgcagtgacacgaccttggctcactgcaacctccaattcctggtttcaagcgattctcatgcctcagcttcttgagtagctgggattacaggcatgcaccaccatgcctggctaatttttgtatttttagtagagaaggggtttcgccatgttggccaggttggtcttgaactcctgacttcaagcaatccacccttcttggcctcccaaagtgctgggattacagacgtgagccactgtggccagccaggagcttggaatttaaataggctctttggaacacattttcatcaggtttaaaataaaagttgaccttgatgaaacagtgaagccactcagcaatctttgggatttgttttgtggagccaacattttccgaagattgagttcatactttcattattggaaatataacattccaccctgcagaaattctgatggtgccttggtttcctttcctaagcccatgtaatgctgcttttagtggtctctaagccagccctacaacattgctgggactgcaggcacgcatcaccatgctggctaatttgttttttttgtttgttttttaatgtagagacaggatctccctatgttgcttaggctggtcttgaactcctgggctcaagcaatcctcctgtgttggcctcccaaagtgctgggattacaggcaagagccaccatgcccagtctccaacagcttcactgaccatccctccccttgccaggtgaagctgtcttcatctcaagggctttgaaataaaagatacttgggcagatgtcaaaatgatgggattacaaatgacttcattacaaatgctgttatgtctgcctcaagtctgacatcattttatgaagctaatgacctatctcaggttaccaatctgacagcttttcatcggacaggtgcctcaaaaatgtggaggccatttgtagtttcatttctttctcaaggagggtagcctgaaaactaaagtctggaaaatcaaaagtaaagtaaactggaaaatcaagcagtgtctaggtaacatgtatttatttcatcacaccaaaaatattcacaggaagttccttgaaggaagttgattcttcagttcctggcatgtggcggtccatcctttcttaatgttaggaagataaagtaaaccccaaatgtgtgttttttccaaaatcaaaatgttgtccaaggaatgctggcagagaaaccactgtccttcacttcaacttttcaattagaaaaaggggtaatgtgtgctgtcagtgtgaaagtatatacaatgtgtttgtccggcacacaacaggagagtgaataggaacatctggccatcgcctcggtgaaattgaacaggcatctgtttacctctgggctctgtgacactgatggttttgagcttaaagtacacagaatgctttatctgtggcctaatttacattgctgaatacaactacttgaatcagaaatcactgtcctcaatctgagcatttttctccctgtgattagtaggaatgtgaatattgttccaaagaccatgatgcttttgcccttttggactcacacagggctacactctgtgaaccttttcagttatgttttgttaagaattaatcaccacaatcagagaaatgtgattaaatataaaagaactcaggacaaaaataaggcatgtgggaagtcaattacataaagtatttgcacaggcatgaatgtaccattgacaagacatttaaactagtttgtatatttagtctctcattcgagttgattatttgtaaaaaaaaaaaaaaatcatgtaatatatatattttcaggtttttccaagtgtcttctacccacttctttgactttataatgtttaataaagtattggcggccgggcgcagtggctcacgcctgtaatcccagcactttgggaggccgaggcaggcggatcaccaggtcaggagaccaagaccatcctggctaacacggtgaaaccccgtctctactaaaaatacaaaaaattagccgggcgtggtggcgggcgcctgtagtcccagctactggggaggctgaggcaggagaatgtagtgaacccaggaggcggagcttgcagtgagcggagatcacgccactgcactccagtctgggcaacagagcgagactccgtctcaaaaaaaaaatgaaataaaataaataaaataaaatattggcaacattccctatcccccccattgagcgtgaaattcataaagcattttggtattactgttttgtagcacatcaaatgcctgtgtcgatatttgtggcagttgagaaaacacactaattaatggtatttggaagacaaaaatctagtttgagagaaaatatataataatgttttcatttaaaagtggattggggtaatattagggcagtataataaatattataatattttattgtggaaataaagtggctttgggcattaaaattatttcagacctttacttttccttggatggttcaagaacaacttcacgtttgtcataagcttgatcctcagtgaaggaattgcttttaatctgtggattaataggtgtagtattcagtgcatgcccacaacatggtaagtactgtctagaatgaatgaaaaggtagaccctacggagctgacactagttatatgaggcaagcaactggtccttttactttcatgtgatttttgtcttgtatatgtgtgtgaggtgtgcatgtgtgtctgtgtatgtatatgtacacaaaatgtatttttggcttatgttgatgaaaagcagtagagggatattttgaatgtctacatcagctgtgattatcatcaccttttaattatgggtgtcctatccctttgccactttaacatgggcttcttgaagaatgtgggtgttaagaggaagaatgggggattgtgaagtctctcaaatcaggatcacaaaccatttaaatcatcattgctactccattccaggttgaaattgtaacacacactggaccccatagacgtctgtggatgggtccacagttccagttcaaaaccatccatccctcaggccaaaccacagttatctcatccagttcatctgtgttgcagtctcatggtccgagtgacacgccacagcctcttttggattttgatacagatgatcttgatctcaacagtctcaggtaggaaatgagaattagggagtgatttgaacaaaaggattaatatgttcgtgtgaaatgagcatcatatgtaatatttaggtttccccttttggcacagtatcatgttgcagactacatgtactgttgcacgtaattccctgtcattacttgagatggtatatagggtctcgtgggatcacattacgtgcaataaatacttgcttttcagattatattctccctaaatctaatagtcactgcacttttcaagcaattccactttttgatgctttgcttatatttctaactgcttgaatctgattatgtattcttttcctgatctttctgaagttggcaccacctttcaattaaatttcatctgtgatttttatctaatcctgtatctcccttcttttagattatataaagtttttggatggaaaaacgttggtataaattcaattatagtttatcttctatatttttataatacatgttctctcatccttatttgtaggaatcctaggacaggtgtacaaattatgctttttattattagcttttttttttaattgcaactcagacagttttgacttgcagtctcaagtttgcttagcagtttaatttgttataccaagacttgacacattagggtgcaacagataatgaaggactcagtctaatgtaatataatctcccttttcttgtcttctctttaaaaaaaactctatagtatatcttgaattgaatataaaacaaccctctgacctttttcttgcacaccttttaaaaaatagtgggaaaaaatgttccagttacatagtggaaatacgtttttgtcttctttgtcagtaacaataaaaaatttttataacaagatgaaaattgttgcaaagttggattatgcctgatgtatctgtttagaaaatatgacacatatttactgagtacctgccaggaggtgccaggagataagcctagagtacggccggctgcctacttgggtctgaattgcaactcttcatctcactccctaatcctgctctcacccctattctttgtcatctctattttattttatttattttttattttattttttgagacggagtcttgctctgtcactcaggctggagtgcaatggtgtgatctctgctcactgcaacctctgtctcctgggttcaagcagttctcctgccttaggctcttgagtagctgggatgacaggcgcccgccaccagacccagctaatttttgtattattagtagagacggggtttcaacattttggccaggctggtcttgaactccttacctcaagtgatcctcccgccttggcctcccaaaatgctgggattacaggcatgagtatttttttttttttttttttttttttttgagactgagtcccactctgtcacctgggctggagtgctgtggtgcgatctcagttcactgcaacatctagaatgtattctagcctcctgtattcaagcgattctcctacctcaacctcctgagtagctagtattacaggtatgtggcaccacgcctccctagtttttgtgtttttagtagagatggagtttcactatgttggccaggctggtcttgaactcctgacctcaggtgatctgcccgcctctgcctcccaaagtgtggggactacaggcgtgagccactgcacctggcctcatctctttaaattactccacaaactacctactcaagacagaatctagaggttatccttgaaatctctcctttcacagatgccacatctaattcttcaccaacttatgtcatttctattcaaaatacatctagaaaccttccactcctctccattcctaatgccagcaccctagcaacatctcacagactcctaactgctgtccctttttacatttttgctttcccctgactgatgtatcttcttaaagaatgattcagccaggcgtggtggctcacgcctgtaatcccagcactttgggaggctgaggagggtggatcatgaggtcaggagttcgagaccagcctggccaacatgatgaaaccccatcaaaaccctaccaaaaaaatacaaaaaatacaaaaaattagccgggcatggtggtgcacacctgtgatcccagctactcgggaggctgcggcaggagaattgcttgaacacaggaggcggagatttcagtgagccgagatcgtgccactgcattctagcctgggcaacagagtgagactccgtctcaaaacaacaaacaaaccaacacacaaaaaaagaacgattcatcaagaagaatgtatcttcttttaataccttgtttagtattttttgtttactctgctttgtattttgtttttttcttctctgcattttttttgttccagcataattcctccagctttctaaaaatgacattttttgaccaagatgtcaggtaataatgacagaatacagtgagagtgtcagaccaattttcagtgatgctaattgattaaatatggtctagattaggacctgaagccatgatcagggagtcaattctttgcagtcctcaacttagtgattcagtgtactcgtgtttacaacagtcatttggttatttaaatcttaataataaagcgtttaaaataagtaaccaatttattctcttcacaactatataacacatttagtttttttgctaaaccgtgcacaagacactgtctcattttttttctagtgattgaccagctgctatttataaagccctgtgctgtactttttctgaggatgtctttgccccattgtttcgtggcctcctcagctttctttgttactcttttcctcaggtatagtccttctattaagataattctaactcgcttcttttaaaagcagatatagctacttttcagaatccttaagaattttcctcgcagactttccctttgttaataataataaataactccccaaattttgtttaaatctaaatgactttaaattgtttatgtttgattagaatattatcctgtttacaggacacatataacctttagaaacctttatactgagcagcaggtttataaatttctgttaattgcatttgtaatttatattttaaactttcagcaggtaagcttggttgggaccttggctaagaccctacagcagtttttatgggaaatatagattttattcacatcaattttaagtcctttttagtaccaccatttcccacccggcatccaattagaaacccaactattgagattctcctcattctcgtttatgatcactctagcccagctccttgtctctcatctgatttctacacgcctgtgcatggtggcctatggccgaccattggctttactttctctcttaaattgtgaagtccttgtttagattttttggggctcacctgacccttgacacctagtacactgtcctgtaccccataggataccaataataatatgtagtgcagtgataatcttcctccctgccgcctaaccaaaatgggaaacaggcaggcatagtgttgactctcatccataagggaatcaggcaagctccctacacagagcaggtgtttaaaaagaatgggcaatgaaatatttgctaacagacctgagaaacatataatgtaaaagatgctgagtatgcaaagcctctctttccactcgattagctcctcagaaattggttatcatttattttattttatttaactgagatataattcacataacatgaaatttaccagttttaaaatgtacaagtcagtgggttttagtatattcactatgtttggcatccatcccactaatttcagaacgtttccatcatcccaaccagtttttctctttttttaattatgaagaaaattcaaacatgtataaaataaaaagaaaaatagcataaacccccatatatctgttgtccagcttcagctatcaagtcatggccaatcttgcttcatctgtagccccattcacaccctacctccaactctggattattcagaaaccccaatataaattgactaactataggagttgtattagcccacataggaagttgtttagactagaagggggcataattttgaatggactgaccatatctaagaggctagctttttgttgctctcaagaacaaggaaacttcttttccagacactttaaataaacttctcttttctaactggcccacattagcttaggcttacctatcccctaactaaccactgccgagatgtgatgagattaccatgattggcttagaaaaattagctggggtggaatgaatattgggtagtcctacatagcagtgatcaatatttgttaatcagtattttcaccttccggtaatagatcatcctatacctccctcctgttttttcttcctcacaacaaaagcatgcatttcataactagtctgcagttcatacttggcatttcaggcttctgtcatctgtcccatgtttcttatcaactttttatcttccatcaatagcctttatgaactctatacttcagccaaatcatgcacttcaagatgccctgaatctatcgtattcagtcactaatctaagtttctatatgttgtagtcctgtgcttaaagggcatttcttgctcctcttcattatgcgtatatactattactatatacagacctaatccctgttccagctctgcaagatctctaactgatgtggaccctgcatgtattcccccatctcctcaatctgagcttttactatttatgtcattcatatttacactttagttttattttgcattgtcatgaatgttcatgtgctatgtcatatatatacacattggtctgtattttatgttttgtttctgcttgttctcagagtaatgcctacaagcaattaatattcagtaaatacttactgtatgaatgaattaccagaaatgcatgcatatattgttgtaataagtttttgtttcactaagttgcctgggactttcagatcttttaatcttccagatacttttatgttaatagtatttattctaatgcagctagaaagagacactcggcatttggcatttatatgtttattattcttttttttttttttttgagacggagtcttgctctgtcacccaggctggagtgcagtggcacgatcttggctcattgcaacctctggtttttgggttccagcagttctcctgcctcagcctcttgagtagctgggactataggtgcatgccaccacacccggctaatttttgcatttttagtagagacggggcttcaccgtgttagccaggatggatgtttattattcttaagcaactttaaattgtgtgtagtaatttgcacgtttactgaggttctaattgattgttgtatgctagttggtaattttataaaggtagctcagttagtagtgacccaccccggccacagtacatctttgttatcctatgcttactgtcagatataaagtaactttcattgagcattttaatggagcatctcaaaatttgaaattacacattgctgccttttatggaacacattaatagctatggtgatattagtgaatttcaggattctcaaaactcttcatgtgtgtcccttggaaatcccaaaggtttcagtataaacattttcagtgtttaatttcctctcccattctacttattgtatccctttaaattaatgtcagcttttcagtcccttccttaaaaatctatggaataacacacaaagataagttagaaggggtccagagtgtagagaatatttgtagtgttttatccttgtgcagcaattagggactgcagctcccctgtttgtcttgttttagaatggatggttctttaatggattgtgctactccagcattcctgatttaaggtcatttgtagcaagtgacagttttgatgccagtaacatatgtgaattaaattaaattgcattgcaggatccagccagtccgctctgaccccgtcagcatgccagggtcatcccgtccagtctctgatcgaaggggagtttccacagtgattgatgctgcctcaggtagaaaaccacctctgaaatatttattgggcagtcctgtgcatttttaactaattttctcgcacaatgtagaggatgacatttatttgctttcctctctgtttttttgttttgtggtgtgtgtgcattttaatacagtactgtgcctatatttcttgctgaacaatgccatgcttttaagcattcctaaggttggtgaatgatgcagtggagttggcacttgattaaatgtaatgaacatagtattgaaggctacagggttgatgactgttttgcctttgatcactgaaatgtggagaagcaaccttgacagagaacgtaaatacaatctatggattcaatttactcaacctgttgagtatcaaagtgcctaatctgtgggagtagagaggagacagtccaaatgctatagcttgaatgattttattatcaaaagcatcaagtttaaaaattcattaacttaaccctggtctatctatcacagttattaatttcctatccttggaaacaagctatgaatatgtatcattagtacagagaaggagatctttgcctttataggtgatcgttgctccattagtattataaaacttttcagccaggcctactaaatggtagaattgtctgtagtgatatattttctcgtctctaagtcaagtgataaaataaggacagtgatgccttgctttatagtgcagctggggagcatctgaagacagcgcatggcaggattttgtccaaaaattctctctcaagtagaattattaaatactcggcgttagtcaaacagttgagtcagagaggattttaatctatagcgatttcaaaatccctagagactgctgatttgattgaggcttaaactgtgaaagaaaatggaaacaaacacaaaactgatttgtgaaggtcactttaaaaagaccaaagtttctgtctgtggatatggatatatttttaagtttcaaagctaatgggttttatacatattcttagctttctgattttttggttagtggattgtaccttgcatcttactgagctgccccatctagggctatgccttcatttttaacgtagactattactttagaggactcatacttgttcctactgctttaacttggcaaccatggttgtcccctggaaatgagcatggaaatgtgtagagtcgctatcattgcttcccggcactgaatgagatatcgagatagggaacttaaacaataaatcttttttatagtcacattctgagaatgctaagagattgttgtgctcgtttggaatgatcgtttacaattgtgaatcctggaaatgttacatattttaatctgaagtattttattcaagattacaagagtaggccttgattgggctttttaaaccttcttaaactaccagattactgatgttttattgtcgagtgactagctactaggaacacatgctgccaaagcagttaccttgtgttattaaaagtagacatattcaatactagattctgaggtaacactccatatatatatatttattttttatttttttgagacagagtctcccactgtcacccatgctggagtgcagtggcacgatcttggctcactgcagcctctgcctcccaggttcaagcaattctcctatctcggcttcccgagtagctgagactacaggcacctacctgacaccacacccagctagtttttgtatttttagtagagatggggtttcaccttgttggtcaggctagtcttgaactcctgacctcaggtgatccacctgcctcagcctcccaaagtgttgggattacaggcatgagccactgcgtctggccaacattccatatttatcatgtagcaatcttagctgtatgtaaagtcatctcatgcaacaagggaggagcttcagtgaactgttatttaaatccttttgcaagaagagtttttaagttgacttttgaataaggaattagatcctacatgtaaataatctgatatgtaagtagtcctaagattacttaatttgcatcagagatacactgtatgagtttcgatggcattgaccctctctgcctgaaagtacccatcttttgagtaggaaagaacttcttggtggctaagctttattattatttttctaggcctgttttcattccaggaagccatggtacctttctgaaagacaaccaaaacagtgaaacatgtgtgctgccttctttaactttgagctaaagaagcctcatagataaggaattggacttttatgagtaattctctcttcagctacctctcaattggttcagatcccttttgaatgagaaatatatgttaacgcattttttgagtgaataatgttttgtcgtggaatgtccatctactttaataggaccaactgttgtcaacagaattactttctacatctgtggaaaacaacatctaggctaacaaaaatcaaggtagcaagtctaacgaaatcgaggctaaataatttgagttctttatgtaaacatatttatgggaaaattttgttgtagattcttctgttaaaaagaatctaataaatttttataattgctcttgaaccgggaagtgcacctctgattatgatccatgcattggagtcagctgcacatcaggaagttgcttatctggaggtttcattgcctgttacttggagatacgaccagtgtggcacctcctctgttggtcttcattgccctgtattaccttcaagcattttatatgacttcatggattatcttcttaattattcctatggcacatgttacacctaaccctctattttagtgacagctcttgctctgtctaaccttgtggcagtataattgtttttcatataattactttattcacagataatagaatttaatgtgatataattaaatcctttgacaattataacagtttttaaagtgaaaatattttatttaaatcttgggtctgcagtttattttctagatatctatgtattaatccaacaacgttattccattgaaactaaaagaggtgtgcagagtgtgccacttttaccatgtaatggtttttttcacaatttcttaatatctggtaatctctggttcatgcttttgcaaagaaacacattgcctaaaatacatatttttaaattattaacttcagtgatttaagcaccgggtaaattctatgcctttagacacctatgaactagattcttactgtctctctgtaaaatacatatagagtatttttgattttcagcagttctataactgcttgatgagtagatgttattcccataacatctgtctcatcttgtctttggtgattctaatgacaccataccagctgggcgcagtggatcacaactataatcctagcactttgggaggccgaagcggtggatcacttgaggtcaggtgtttgagaccagcctggctaacatggcaaaaccccgtccctaataaaaatacaaaaattagctgggcatggtttcacatggctgtaatcccagctactcaggaggctgaggcacaagaattgcttgaacccgggaggcagaggttgcagtgagctgagattgcaccagtgcactctagcctgggtgaccgagcaaggctctgtctcaaaaagacaaaacaaaacgaaacaaaacaaaaaccatcctacctaaaatttgtgggggttaaataattgtaagatgttccattgttggctgaggagatcattttggaaatggacacattataggattttaacctaagacacaggctacccagaacaaatgggatttggggcagttgctcactttttcccatatccagctgatgaacaacaatgtcgatgaatcattgatagtatttctagccaaagcactgcatcaatttattcattttcctgtatgttcattttggctagatagctaagaatttctttctattctttgtaccttataacctgtgcccttcttttgataaagatgtaggacctctaaagagaaagcagaaagacagctgtcaatgtcttgttggaactttgttttccagattgctgactattcttgttccaaaacttgaaggctatacctaatagataacctttccttgcttctgagtcatcaaatcaaagagcctagaaagatctggttcacccctgagtttgtttgtcctgatttgtggttttactatggagatggatgtttactaacaaagaactcagataattgagatcgaaagacaaacttatgcgtgactcatatgcagagcagacatctttatcaaactctattaaagaaaacattttataaagttatgaggtgtggtggaagcagtgtttgtgtacatgcctgaggaagtgtggtggaagcagtgtttgtgtacatgcctgaggaagatggtagtgtgagaaggacaatgtgacagataagaaaaatgacttcttatcctgagcagccttggatcataaggtattagtgttacatcaagcatttcagtaaatagggacaaagttgcagacttggggttttttgttgttcttgactcaagagaaatactacttttgttgtacaattgaagtaataaaaataattaatttaggagataccttttgagcacctaattttctccactatcaaatactgtttactgaagaaaattacacacttaaaatcccaaactagtttgatttgattgattttataatgatcatttatgcctactttatgtatttggcatttggtatatcaccttaaaaaaacaaataatactcattaatagagaagtgtgattagataggtgacaaggaggttatttgagcagtttttgttttgtcttgcagtcaaatctgtgctggaaggaccttcttatagaggcattcttttatcatatagagattttgttcatggactgggggaagagtattctttttttttttttcttcgagacggagtttcactcttttttttttttttttttttttttttttttttttttttgagacggagtctcgctgtgtcacccaggctggagtgcaatggcacgatctcagctcactgcaacctccgcctcctgggttcaagccattctcctgcctcagcctcccaagtagctggaattaacaggcacgcgccaccacgcccggctaattttttgtatttttagtagagtcggggtttcaccatgttggctaggctagtctcgaacttctgacctcaggtgatccacccacctcggcctcccaaagtgctgggattacaggcatgaaccaccgcgcccaacctgggggaagagtattctaagattatatttcactgtattgacagttgccatttcaatctgaggcctacttaggtactatttcttaaaggctgtcagaggcatagagatgctgatggtaaaaataaagagattagtgagagacattgttcagtctacaatgatgtggccacatagctccatggtcttagagctagaactgagtggaaaaagccatgacttcataatcatggtcttgaacttttgctgaaaccttcaagtcattctcctaccatgccattcacttctacatcagtaaaagaagattaagagtccctatgcaaaactttttttaccaccttttgtggaaggggtgtgttcaaattatttccttaagtaactcctgaatataaagttcttcagaaatattaagatattttttgaataaatgatgtgattttcaattaatagagtttcagatattcttgatgattataaagtgacaaaaactccagggcatataccttgggtactgaaagcttgtgtgggatcagtaagaagattaaggataagagtgaaattaaaagaaggctcagccctgacctgtgaacaatccctcagaggggaaaaaatattcaaactcaaatattaagattggcttttatattagaaatgagtaagtgtatacattaaattaattctaatctttcgactatctgctgtctatataaaatcaaaagtaagttttagagattaagaacatagggaaaagaccttatttgcccataaggaaaatgctcagctgtatctctcctcttctgatttaaacattcctcttattcttctttctttctttctttcttttttttgagatggagtctcactgtgttgcccaggctggagtgcagtggcgtgatcttggctcactgcaacctctgcctctcgggttcaagcgattctcctgcctcagcctcccgagtagctgggattacaggcatgtgccaccatgcccagctaacttttgtattttagtagagatggggtgtcaccatgttggtcaggctggtctcagactcctgacctcgcgatccacatgcctcggcctcccaaagtgctgggattacaggcgtgagccaccgtgcctggccctttcttctttctagtatttataggatgttagaagaccaaagtcaagttaacaatgaggaaaattttagttcagcacaattaagaaaaaatgatagccccatttgaagatgaagaaacagtaaacaaaagtagaagaagctattgggaaagtgtcttctgatgacacattgcttctttgaataaatctttgtgtcaactaaaaccttgcctatgctttctatattgcaagcatcaggtccttgacatggctttaaatctttcctaagcattttgagagggaattgatgcaatacttctcactgttgatatagtagggttccacatatttacatgggactttttgaccaaagacccaacttttcacttttgtacatttactgtgcctctcatacagggctggactgtttatgtagtctgttgcatcacactatggtggcagggggacagagttgggggcactattagaatttgtttaagtctgaaccgggaattccatttgtcttagtgacatgagtgtcaaaactgttagtgcaacactattttaaactgtctgcaagagcctgagaggcttatgcttataggtgccatctataaacttagaaacaaacaaagagcccctctccattgaatagtaagcccagtgggcaattaaagaacagcttgggaccccacttggtcaactagtcagaaccagagcttctgatattccctctggatattgttgagaactgtcacagaaaggctaaagtaaataatcaaaatgaaaatagttgttccagagaaaagtcttgttctggaagcttggtgttaaggaaagaataatgaccactaatttgtggatctttgttagttctagtctcagcggagtccctttcagcttgaaacatggatgaacctgtgttttcaagcacctctgaagatgtttttaaaattagggtataatttgggtatagcaaaaatgcatgttttaatcatacagcttgatgaatttttatactcagccaccactcacataaaaacatagaatatttccgtcaacccagaaagtttcttatgccccttccagttaatactaccagtgacctagaggtaaccatttttatcatcacagattacctttacctgtattaaacttcatatgattggaatcatcttgtgtctgtgcttttgtatctaacctcttttgctcaacttaatttgtttgagattcatccaggtattacatgaatcactagttcatttttaatattgcagtgtagtgttccattcttcaaatataccacactttatatatccaatattctgtcatttccagcttttggctattaggaataaagctgctataaacatttttttataagtctgtctgtctgtctctctctctctctctgtctctcgtcaacatatgcatacatttcctttgggcatatccctagtactggaattgccggatcacaaagtaggcatatgtttaactttattaggaactgccaacacgttttccaaaatgactgtaccattttgcattcctatcagcaatgcatgagcgttccagttgctccacattctcatcaacacttgatattattgatctttattttaaccattccagtggatgtgaactatggtttgaatttgcttttctctgttgagtaatggtattgagcatctttaatatactcattggccatttggatatcatcttttgtaatgtcctagttaactcactgatttttattagatatgttgtctttattgaataccaagtgttctttaaatattctggatatggtccttttgtgagatatgtgcattgcaaatattttctttcagttaattgcgttttcactttcttaatggtatcttttgacaagcaaaaatctaattttttcattgttttttccttttatgttttcacaaacaaaaaaaatcttttgtccagtcttttttttttttttttttttttttgagacagagtctcagtctgtcactgaggctggagtgcagtggcatgatctcggctcactgcaacttccgtctcccaggttcaaagtgattatcctgcctcagcctcccaagtagctgggactacaggtgcccactaccacgcccagctaattttttgtatttttagtagagatgaggtttcatcatgttggccaggctggtctcgagctcctgacctcaggtgatctgcctgcctcggcctcccaaagtgctgggattacaagtataagccaccatgcccagcccctccagtcttgaagagataactcttttctagaaattgtatagtttaagccttcacatttaggactatgatccttttcaaattaattttttattgtgggtggtcaagtgtggtggcttatgcctataatcccaccttgggaggcccaagtgggcagattgcatgagcttaggagtttgagaccagcctgggcaacacagcaaaactctgtctgtacaaaaagtacaaaaattagccaggcatggtggtgcacaactgttgtcccagctacttaggaggctgagatgggaggatcacttaagcctgggaggttgaggctgcagtgagctgtgatcacgccactgcactctagcctaggtggcagagcaagaccttgtttaacaaacaaaaaaaaattttattttgatgtagggcagggatcaaggtgtttagtttcttccggttgctcccacattgtttatcaaaaagatacgcctttcctattatgaattgcactgatgcctttttaaaatttttattttttcttgggttctttattctgttacattgatttatatagctgtctttttacccacattgtactaccttaattactgtagatgtttagtaagttttgaagtctcatattttaaggcctccacctttgtttttcattctggttatcttggctattctggggcctttgcatttccacacatgtgcatttgtacgaacataccagtggtttttcaaactctgggaattcccaagacactttcaagtggtctattaagtcaaaattatttttatactagtatcaagttattatttgcctttgttttttctactgtggtgaaatttagtatagatggtgcagaagcaattgtgggtaaaactggtggcctgttatcatagtaaaggcaatggcacctaactattgctagtagcctctgctacctacttaagagttcttttttaagctgtattcacctaagaatatctttaaagcagtaaaaatcatcaactttaattttattaagttttgatccttgtgtaacatcttaatattctgtatatcaagtgggaatgaatgcacagtagttgtcttgagggaaagccattgtgatttgtaaactgaactagcaactgttttcatggaatcccattttatctgaataaaacaaactatgtttattcagacatgggcatttggcagaaattttctcaaaaataagcaaaccctgtcacttcgaagaaaacaactaacaatatttattaccaataataacattctagctttcaattgaaaattagaaatttgaaaaccttgtatccaccactgtctgtttaacagagtcccaatatttaaagacatttctcggccggacacgatggcacacgcgtataatcccagtactttgggaggccaaggcgggtggatcacctgaggttagttcaagaccagcctgaccaacatggtgaaaccctgtctctactaaatacaaaaaattagctgggtgtggtggtgcatgcttgtaagcccagctacttgggaggctaaggcaggagaatcgcttgaacccgggaggcagaggttgcagtgagccaagatcgtgccattgcactccagcctgggcaacaagagtgaaactctgtcttaaaaaaaaaatttctcattaaataagtagtgatattaactaatatgattttttgcataatagatattaaaatatatcagcatttggaacatctgcaacattttccgaatgaccagtttcatgttgctacaaaatcatgcaagagtaaaggactcattccaaatgcaagataggacaaaggattttaatgtaatagaatatgaaagttaattgatatagtttcagattccacattgcaactaatttgttaaggatcatatcaaggaagaatatccccagaacctgaaaatgctattaatatactttatcttttagcagttacgtatttgagttagaccaacttttcttcgtgtacgtcaaccaaaacagcatatcagaacagatagaatgcaatagcagatatgagaatctagctgttgtctattagaggattttctcttaaaaatgttacttttctcacttctttctgtttagaaaatatttttatatagaatgtaattgatatttctacatagaggctttatcattgtttttaaattagctgatacataattgtattaaatgttgatagatatagtacatataaaccaaagatctttggggtcctgggttttttgttgttgttgtcgtttgtttgtttttttgagacaacctcactttgtcatccaggttggagtgtggtggtgcaatctcggttcattgcaacctctgcctccaggttcaagtgcttctcctgcctcagcctcccgagtagctgggactccaggcatgcaccaccatgcccggctaatttttgtatttttagtagagacaaggtttcaccatgttggccaggctggtcttgaacttctgagctcaagtgatctgcccaccttggcttcccaaagtgctgggattacaggtattagccaccgcacctgactggggtcctgagtttttttaagcacactgggatcctgaattttaaaatgtttgaaaaccactggtatgcatattctcgtacacacacacacacacacacacacacacattaaattactagtttgtttgtttatttctacagaaattcagatgagattggattgggatttcattgaatctgtatatcaaatttggaagtattgacatcttaaaaatactaaatctttcaaaacaagcttttttaattttttgagatggagtcttactctgttgtccaggctggagtgcagtggtgtgatatcggttcactgcaacctccacctccagggttcaagcgattcttgtgcctcagcctctgagtagctgagattacaggcaaaacataaacttttataactattcacttatttaagccttctttaatttctccttgataagtttcaatgtagaagtcttacacatcttatataaaagttttttctttctattattacattttgatgataactatagcacgtttttatttcacttgtcagttttctttacagcatatagagtaaaatacttttctgtataataaacttgtatcccagcctgggcaatatagtcagacctcgtctctacaaaaaaaaaaatttttaaattagctgagtatggtggtatgcacctgtagtcttagctacctgggaggctgaggtgggaggattgcttgagcccaggaggttgaggctacagtgagccaaggctgcatcactgcactctagcctgggtgacagaggggaaaccctgtctcaaaacaaaaaatgaacttgtttccagcaacttttccaaattcgtttattcattctaatagtagaatctcttggattttctactatgtaatcatgtcatctgcaaataaagatggttttatttctttttaatctttatctttctcccatattacacttgtttaaacctccactacgatgttgaatagaaatgatgatattgaatattcttgttttcttctcaaccctaggaggaagggtttattatttcactatgaagtataatgacaataagcaaaaatttatcaaaactgaagcagagagagaaaaatactgaaataaaatagaactcactgtgagcggtatatcaaactatagcagtatcaaactgtctaacatctgtgtaattatttcacatatgtggaagaaaagaagaggatatggcaaaagaaatgcatgaagggttgagaattttccaaagttaatgaaagacataagtcaaagttttaagaaactcagtgtatgctgagtgagatattaataaacacaaagaaaaccatacgtagacatattataatcaaactgttcagatctaaacataaggaaggaattttaagaagcctactctgtttctttatttgtttttttcttttttcttttttgagactgagtctcgctctgtcacccaggctggagtgcagtggcgcaatctcggctcactgcaagctccacctcccgggttcatgccattctcttgcctcagcctcccgagtagctgggactacaggcgcccgccaccacgcctggctaattttttgtatttttaatagagacgggatttcaccatgttagccaggatggtctcgatctcctgaccttgtgatccgcctgcctcggcctcccaaagtgctgggattagccactgtgaccagcctctttatttcttaggtttatatttaagtgatggtttggacttttgataaaaagagaaattggaaaagtagcagggtgatttttaagtttccttggcagtgtgagatccccatgtctgaataatcaagaggctctatgaggaatcttcaggatatttttcaatagacagaagtaaaagagatgggaaaccagtattaatttataaacagttaggtgcccaacactgtgctaggtcttgccacatgtctcatctcatttaatcttctttaattaggatcaaggtccattttagcaatagtcaaagaacaggacttaggacacctagctcctgatacttaaaattacttaaagtgcattatggtgacacctcagataagtctaaacctctttctaccctgcctaatcaaatattcatttcaaaacactgtatgctgaaatgagccacgtgggagttgaagagaatcaactattcaggtggtgaaaatgtgtgaatgcagctggcagatgaagttccagtgtgatgaattcccagcttgtccttattgctttaggcaacaactgacaggcctgactggtcattggctttccattcctggcattgatatgactgaaaattcttaatgtcacagatccttaaaagctgtctctgttatcatggatataaatggtgctggagggtccttcttgcatagagaggtaatcaatatggtctagagttcttgacctgaacctgtaattacttggacattttgaaggtagcttgttgttacagaatattcatatattcagaacattgggactgagttgtgcatggagaggagaaaaatagagtctttgtccccctttctgttcttagtatttaagaggccttcataatcacagaagagagtgatattataggattagaacattgtatttttggttttgggtgctgaagttctaatcttacctctgaagtgatcctgatattttgccaaagttgtgactttaatattctgtggcttgtaattgtgatttttctaataccagagtagaattctggggaggaatttttctaaacccaaatacctcaatttgaagtgaggcttggctttaaataataacacatttgagtttgagcttttcctgcaattaagtggtatgctgcaaaaaggaattcggttagcagattttatggcatccatgatccatggacaagagtgagtagaaggagatgatactgatagcaattcttaagtctctaaatgtttttacgttgttgtgatcaggatttctttgccaaatgaaaacggtaaaagtggaagcatgaaacaccttaacagtaggtgtggatcctgattgttctgttactgcttggcttaagatacccctggatgggctgggtgtggtggctcacacctgtaataccagcactttgggaggccgaggcaggtgatcaccaggtcaggagatcgagatcatcctggctaacacggtgaaaccccatctctactaaaaatacgaaaaattagccgggcatggtggcgcacacctgtagtcccagctactcaggaggctgaggcaggagaatgtcatgaacctgggaggcggagctcacagtgagctgagatcgcaccattgcactccagcctgggtgacagagtgagactctgtctcaaaaaaaataaaagatactcctggatggcattattattggattaccttatatgtagcatgcttagaacagagggggaaaaatgatggcttataataaaggactgtttgagaacaagggctgtctttgtatctccctttgcctggtattggtaccttccacagagcagataatcaatatttcttgatatctgattaataatgatagtcagtgatgattaataatgatagtcagtgataatcaacaatgataaccattgttgatttcttataaaacataaggctttaaatatcataacatgattacaagttggtaatgctgagtctttatcttcgttacctgacttaaacctggtcctcagttaggtttgcccttatgttatgatcactattcctttgtatgggcctatggtcaattgtgtaatcaagtgaaatattttacaaagcatttcaaattatcttttatgttatgcttttaaagcagcattatgtttaaacagaatatttctttgatacaagctttcgttctattaggcttagcatggaaatttttgttttaaggttatctttataaagcattaactctagcgaagtcttgctttctggaatctatggtcaggactggtaaacatctgttgaaaagaatggacaggcttttgctttctgctcttactaggctaactttcagacataattttagggatattttgggctgcctttgaagctagcccattttgggcataggacattggcatatggagaactgaccctaagttccattaagccaaaacattttgttgaagaatttccaaaattttagtggtgtcattacagtttagttacttgtacttatgctctagacagctacaagaaacatggtagaattgacttctgttgtatgaagtggcgtcttgagtcttaaacctattttactttggtgttctacaatatttggaaaggcaacagttattatataaatgttcaatgttaagactgtagagaacactaagttacacttgacacttagttgaactccccagtcagttatcccttctttagatgagtttatgtagttctcaaatgaatgcttgtaagactgggaacagaacccatttactcttctgtttctctctacctaaagaggaaatagcgaaccctatgatcttctatttgggctaccttttccttttcctatgttagaaattcatagccatgagtcagtacctcaaattagagtttttatagccatgagagggacccagttcctgaatcagacggcttaagccagagagaacttactatggtgcctgacacttttcatttctcttgaaacatgttcttaatctttctctttattccaactcacccccttgattaaattaattactttctcatgtgttcttaaacttttactgttatgtgtaccatctgatattaaaattagttgggtattgtttttcattctagactatgagctcatctttgtactccccgtagctccctgaatggttttgacacataataggcactcagcaaatgttaatgaattcaatatttcatcatggaacattgaaaccaagttcttgcatttgcctggaacagtaattacctcctcaaagagaaactgtgtggctagggagcagaagtgacaaggagaccatctttccactagagtcctttacaacacggccctgcattatccatgcaaacataaattaaactctgtttttaacaacatactttttagattttttgttttcaacagttgaagatgctgaggttaagagatttaaataacttgtctactgtcacagagctagtagatggtagagcaaaggtgtgaatctgtgaaaccttcattttttcccggaccttgaacagcatctcagccaaccttgatttcattcatataatcatcagggcatgtatgtgacctaagaactatttatatttattctttttatcatatactgttgtatcatagaggacacaaaatacatcacctccactctggaatggcacctctattttaaaagaccattggcaaaacctctccgatgagattttgatgatggaagaatgttatattcaagactcacctaactatacctgcatctcacagatacttatcctttaagcagtaaacagttattttcagctaggaaagccactctcaatcaggtagtggtttcttaagctgaaaaaggctttccacttaagaatcgtgataggccaaggtcattacctttccgtctacttatgggaaaattcaaactaaaggaataccagtgtttgaaactcacaattcactctatagtggggagtgggggagtgcaaggcaagcaaagtgattatatttcccttagaaatattgttaactattttttcaaaatatggattaaagcttaaaacatacccaaaatacactgattctaaatggacctgacaccttgatcttcaatcatggaataacatatgagtgaggattcccaatggaccattgtacactacaatatttattactataaagatctaagagctcttagccactttcaaacttttaagagttgttcagctctcatcctcttgacttgtgttttcacattttaaaattctggtttgttttgtgtgatgtattcagaattacctccctaccttgatttcagaataatatttggctttttaataaatttaaggaagtgcagatatgaaagtatacccattaatgcatggggactgcagtacctttaactggcccatttttggcctctgtttatccatctgcaaaacggtgactaggttttgccttctagttagttgatatgataaaaatactaataaattgaaaggctgtgggatgatacctttatcagttccttctatggatggtgtaattttcactgtagtttactttagcatatatggtctcaagaataaaaataaggaattactaaggaacctcctgaatgcaatactattaacattcacaaaaatagctatatgcaaattagtagatgtccttagctgagacaaaattattttgaggttgtgatcatgaaaattaacgtaagctgatataattttgaattgtatgcatctgttttcatgaaagaaacctatttggagaggtttattcttgaaaaattatggaattaaaagttaaataggattcttaacatctgtttttaaatcttgaattatatgcagctcatagagtttctctcctgtatgcatattaaatgatatataatgaactatcagtggttttaggtaacatttggttactgaatacactatgctaagcatttcacgtgcattatcacctgtattcacaaaatattatgaggtaaaagcactgttacaatttccatttttttcagaagaaggtgtgatttagagaaattaagtactgtatactacctcccaactttggcagtgtcatctgaatttttttgtcatgaacatgttttacatagcttgttgttaaagtccatttttgataaattttttgaatagacgtgtgtaatgcaagtgcatgagctttgtggttaggtgtagatttcattcccatttctgtagctgactgggtacatgaccttgagtttctttgtccataagaagagtataggaacatctgtctctgatgttgtaaaaattaatagataataaaaatcttctggccatagttcaggtacataacaaggactcattaaatgtcagttgtcaccaccttaccttctttccgtaaaatatttcctttctgtctgtcccaaagttttagttttgctcttcacgtgtatcataatgtattatgagcatcctaagaagataggttatactattgtccccattttacagttgagaaaacagactgaaatgttgtagattcctggttgaatccctatagcagtctgattccagagcctgtgtttttagctataatgtgctttggtatgaagatatattccaataacagattatattctgatatttcagacaagaatctaaatcccagaaattattctcttgtacccgcatccctaccattcagttcttcccttcttagattatgctggtataacagtgtatctccttattactcttgtaataaatttgtatattaaatgctcaaacacccttctgattctaaaatctgtgatcctctgtcatttggatacatttgcagtagtctgaggcagctctgagaatcgtttaagggaaaagtattcatcactgtggctttagtaaggaatatgttgacatttttactctaactccaggaactcctactgacctgaaattaaccagttcatggaggtttttggtggggactaaggaatgaaattaactccctaagtctcctcttcttaaaaaagaacctcaaaatactgctgcccaaatggatttaactttagttatatttgtttttacatgcaaatacattttactcagcctaaaaaggcaaagaaatgaagctatttggtttgcagaggaacagatcactctcctgagcatgtcagactgtttatgtgtgtttttcactccatcttactctgtctttgtctttcatgttcttttttctgtctctgtttcagtttgtcctgtttctattgctccctcacagcaactatcttcctattttgataatcctgtttcatctctataaggaaaaggctctctcaaggatgcagaaaatgttactatttttataacagtccctaaatacacaaaagattttaacttggctataaaactttgttcttggcataaatttggcagatagtctttcgcctgggtgagacttttcattgggatcctggaagtgttgggatgtcactattctccactcttgcttctccaagtatgacattagtggttttagctcttgttgacccatctttaaaccaaagctttatagcctattagaagcacagtgtggatttttcttatgatacgttggaataaaagaaaaaacttttctaaagttacaaatggtttcatttaccaaaatgactatttcacttggaaagttttgtcttttctgtaaaaattccaggagttgggtgggcttgatgtcctctctcccattccacctccccacccacagactcatgtcagcaaagatgctgagagttttattccagtcttttaggaggcgagaccttgaccaaggagtagctaagacatatttttctgcttttattttttaaaaactttttaaaaaaagtttttcatataactttttcatcttgtataactgaataaagaaaattttttattgaaattaaagtaaggaaataccacaggatggctttaaagtgtttgtttcactgtggcacatagggcaaatgccttggaacatcagtaattactatttgaggcaacctttggggattgagatatatgcctttcagatctgcacttcatctcatacttcatcatttattggatcaaatagcagtctcatttacttaggatccgtgtcagcgccttgagctccaaatcgggtattacatgtcaccctgtgaaagatcctctgcgttaccccatcaattctgcttcattaaaggactttagatgatcatcttaaagctttaaagaaatgaaaaatatttgccctctccataaaaaaaatgcttacaactttatcttacattttactcagcagagtaactttgcccagccctggagcagaacattcttaaaagtaagcccagtaaacctaagcgttggatggttctgcaagtaaccactgcaaaaaagatttcctggtagaagtaagtagtgtcttttgctagtgtaccaggttgtttaataaaactaggaatagctgagagtaggaaaactcatgaggctttttctcatcacaagctgtgtaatacatacttcaggtaacctccgtgggtttcctcactgctgttggctcagctgtggctttttatggaaccatagctgcatttccatctctttcatccctccctttttatgagaataaaaagtgaattgggtgctatttaaatattctctacttacatttattgaaaactaccctgccgcagggcacagcacattggaaaactgccttgcaccagcccagttttccactcaggtggtttaccccaaaacctggcctttgctttcctcagacctttaatttctttaaactaaatgatcacagaaaaacctaggaggagctagttccatttgtgaggttttcaataaaacttaagtggaatgtggctagaaaagcagacccatgaaaggccatgactactatgctgacactagaggaaaaacccacagaattttttttatttttttgagacagagtttcgctcttgttgcccaggctgcagtgcaatggcgcgaccttggctcaaagcaagctctgtctcctagattcaagtgattctcctgcctcagccccatgagtagctggggttacaggcatgtgccaccacgcccagctaattttgtattttttttagtatagatggggtttctccatgttggtcaggctggtctcgaactccccacctcaggtgatccacctgcctcggcctcccaaagtgctgggattacaggtgtgagccactgtgcccggcctaaacccacagaattcttatacctcttgctttaagtgttgggagaaaatggaaaaaaaaaagttagagctttagtactggtacactttgggacagaaaggcagctagggatgtttggttaaattcatttgtcacatattggtgttttatttaaaatattgtccagaaataaacaattcatacatgttcaattttgtgcctttctgagtagcctggtgaaatcttacagcatccctcccagaccgtgaatcatccctttgtctggcatctccaggctgtctatgctacctatcctttggtcacttggcagccgtcttggttgcagtattacagtgcttgtattcaggtaacctttattttacttaatggccccaaagcacaagggttgatgctggcatattgttataattgttctattttattaccagttattgttgttaatctttgtgcctaacttataaattaaactgtatcataggtctgtacatataggaaaaaacatggtatatacagtcatgtatggcatagtgacctttcagtcaacagtggaccttatatgctcgtgcaacagtgttccagtaaaattataataccagatttttactgtaccttttctatgtttagatacacaaatactgaccattgtgttacagttgcctacagtattcggtacagtaacatactgcacagattttttgtctgggagtaataaaagaggttatagcatatagcttaggtgtgttgtaggctattctatctaggtttgtacaagcatactctatgatgtttgcacagtgatgaaatcacctaataacacactttctcagaacacatctttgttgttaagcaatgcgtgggtgtatagtgttggtactgtccatggtttcaggcatccactgggggtcttggaacgtatccccatagataaggagcgggggacagttgtagaataaattatattttgaaacttgcttcatttattgttagcagatttccttcaagtcattaaatatttttgaagacatagatattttaatggtggctggatcatttatttgtctgattttctatcattaaactttgagatcgtttagaattttttaccatactaatttagaataaataaattcctatatataaatctttgttgttatctgtgattatttgtttaggataaattcccagaagtggaaattctgggtccagaatacgtatatttttaagtcactttatgtttacatattgccaggttgccctaagtaaagttctatcaatttgtgcttcattcattcattcagctaaggttgatgttcctcatttccttcctttagtcttgctttgctaacactaggcttacttttttttttttttttttttttgagacggagtctcgctctgtcgcccaggctggagtgaagtggtgtgatctcggctcactacaacctctgcctcccgggttcaagtgattcttctgcctcagcctcctgagtagctgggattacaggtgtgcaccaccacacccggctaatttttgtatttttagtagagatggggtttcaccatcttggccaggctggtcttgaactcctgacctcatgatccacctgcctcggcctcccaaagtgctgggattacaggcgtgagccactgtgcctggccacttttgtgtcattttatcatgtgcacagattcatgtaaccaccaccatcatcaagatacaaaccgttccgtcaccacaaatatcttgctcatttcttcctgctccattatagccccactcagttcccatcccaccaccatctctgacccctgccagctactaatctattcatctctataattttgtcattttgagatttttaagaaattgaattttacgatatgtgaccctttgatattgcctgtttttaaaatggattataatgcctttgaggtccatccaagttattgcatgtatcaatagtctattccctttaattgctgagtagtattgcatggtatggatgtcgcacagtttagttaactattcacctattatacaacattttggctgtttccaggttatggctatttcaagtaaaactgccttgaacaatcatgtaaaggttttcatgtagataaaagaagtttcattccactgagctaaaggcccacaagcacagttgctgggtcacattgtaaggatatgtttaatttttcaagaaacttccaaactattttccatactgtctgtattattttataatcctaccatcaatatatgagaaatctacctgttgagaaagaattattgaagtctccagctataactgtaggtatgtctatttcttccttcagttccgtcagggtttgcttcatatgttttgtagctctgtttttagtgcatgcgcatctcgggttgctgtgttttctttgtgtaactttttatcattatataatgtctttctcttatctggtaattttcttttctctaaagtctactttatcttgtattaaggtagccacccccactttccttcctgtaacttttacgtgatatatctttttctaacattttagtttcagtgtgtctgtatcattatatttgatatgttttaaatgaatttcctgtaaaaaacatatagttgagtcatgtgttttagtccattcttccaatatctgtcttttaattagtgtttgtagaccatttacattgaatataattatttatctgtcagggcttaagtctgccattttattttttattttctatttgatctctgctttttctttctctgtttttttgtttgtttaggctcgatttggtttttcttttttgcctgccttcctgtaggttatggaacattttctaaaattctatcttgatttgtctatagtggttttttttttttttaatttcaataggcttttggggaacaggtggtgtttggttacatgaataagttctttggtggtgatttctgagatttttggtgcacccatcacccgagcagtgtacactgtatccaatgtgtcatattttatcctttgccacccctcactctttcccctgagtcctgatagtcaaatgtatcattcttatgccttggcgtcctcttagcttagctcccacttatgagtgagaacatatgatgtttggttttccattcctgagttacttcacttagaataatactctccagctgggcacggcggctcatgcctgtaatcccggcactttaggtggctgaggtgggcggatcacgaggtcaagagatcaagaccatcctggccaacatggtgaaaccctgtctctactaaaaatacaaaaatgagctgggcgtggtagtacatgcctgtaatcccagctactcaggaggctgaggcatgagaatcacttgaaaccaggaggcggaggttgcagtgagctgagatcacaccactgcactccagcctcatgacagggtgagactttgtctcaaaaaaaaaaaaaaaaaaagaataatagtccccagttccatccaggttgctgcaaatgccattatttcattccttgttacggccgagtagtattccatttgtgtgtgtgtgtgtgtgtgtgtgtgtgtgtgtatacacgccacattttctttatctactcgctgattaatgggaatttggtttggttccatgtttttgcaatcgcaaattgtggtgctataaacgtgtgtgcaagtatcttttttacataatgacttcttttcctcttggtagattcctagtagtgggattgctggaacaaatggtagatgtacttttagttctttaaggaattgccacactgttttccatactggttgtacaagcttacattcccaccaacagtgtaaaagttcccttttcactgcatccatgccaacatctattattttttaattttttgattatggccattcttgcaggagtgaggtggtattgcactgtggttttgatttgcgtttccatagtgatgttgagcatttttccatatgcttgttggccatttgtatatcttcttttgagaattgtcttttcacatccttaacccactttttgatgtgattgtttgggtttgttttgctgatttgttggagttctttgtagattctggaaattagtcctttgtcagatgtatagattgtgaagattttctcccactctgtgggttgtatgttaacttggctaattatttcttttgctgtgcagaagctttttagtttaattaattcccatctatttatctttgtttttgttgcatttgctcttgggttcttggtcatgaagtatttgcctaagccaatgtctagaagggtttcttctgatgttatcttctagaatctttatggtttcaggtcttagatttaagtctttaatccatcttgagttgatttttgtattaaatataaggtgagagaagagcatgcagtttcattcttctacatgtggcttgccaattatcctagcaccatttgttgaagagtttttatgtatagttttaaaaattatggggggaggagccaagatggccgaataggaacagctccagtatacagctcccagcgtgagcgacgcagaagatgggtgatttctgcatttccatctgaggtaccgggttcatctcactagggagtgccagacagtgggcgcaggtcagtgggtgcgcgcaccgtgcgcaagccgaagcagggcgaggcattgcctcacttgggaagcgcaaggggtcagggagttccctttccgagtcaaagaaaggggtgacggacgcacctggataattgggtcactcccacctgaatattgcgcttttcggaccggcttaaaaaacggcgcaccacgagattatatcccgcacctggctgggagggtcctacgcccacggagtctcgctgattgctagcacagcagtctgagatcaaactgcaaggcggcagcgaggctgggggaggggcgcccgccattgcccaggcttgcttaggtaaacaaagcagccgggaagctccaactgggtggagcccaccacagctcaaggaggcctgcctgcctctgtaggctccacctctgggggcagggcacagacaaacaaaaagacagcagtaacctctgcagacttaaatgtccctgtctgacagctttgtagagagcagtggttctcccagcacgcagctggagatctgaaaacgggcagactgcctcctcaagtgggtccctgacccctcagcagcctaactgggaggcaccccccagcaggggcacactgacacctcacacagcagggtattccaacagacctgcagctgagggtcctgtctgttagaaggaaaactaacaaacagaaaggacatccacaccgaaaacccatctgtacatcaccatcatcaaagaccaaaagtagataaaaccacaaagatggggaaaaaacagaacagaaaaactggaaactctaaaacgcagagcgtctctcctcctccaaaggaacgcagttcctcaccagcaacggaacaaaggtggatggagaatgactttgacaagctgagagaagaaggcttcagacgatcgaattactctgagctacgggaggacattcaaaccacaggcaaagaagttgaaaactttgaaaaaaatttagaagaatgtataactagaataaccaatacagagaagtgcttaaaggagctgatggagctgaaaaccaaggctcgagaactacgtgaagaatgcagaagcctcaggagccaatgcgatcaactggaagaaagggtatcagcgacggaagatgaaatgaatgaaatgaagcgagaagggaagtttagagaaaaaagaataaaaagaaatgagcaaagcctccaagaaatatgggactatgtgaaaagaccaaatctacgtctgatcggtgtacctgaaagtgatggggagaatggaaccaagttggaaaacactctgcaggatattatccaggagaacttccccaatctagcaaggcaggccaacgttcagattcaggaaatacagagaacaccacaaagatactcctcgagaagagcaactccaagacacataattgtcagattcaccaaagttgaaatgaaggaaaaaatgttaagggcagccagagagaaaggtcaggttaccctcaaagggaagcccatcagactaacagcggatctctcggcagaaaccctacaagccagaagagagtgggtgccaatattcaacattcttaaagaaaagaattttcaacccagaatttcatatccagccaaactaagcttcataagtgaaggagaaataaaatcctttacagacaagcaaatgctgagagattttgtcaccaccaggcctgccctaaaagagctcctgaaggaagcgctaaacatggaaaggaacaaccagtaccagctgctgcaaaatcatgccaaaatgtaaagaccatcgagactaggaagaaactgcatcaactaacgagcaaaatcaccagctaacgtcataatgacaggatcaaattcacacataacaatattaactttaaatgtaaatggactaaattctccaattaaaagacacagactggcaaattggataaagagtcaagacccatcagtgtgctgtattcaggaaacccatctcacgtgcagagacacacataggctcaaaataaaaggatggaggaagatctaccaagcaaatggaaaacaaaaaaaggcagggattgcaatcctagtctctgataaaacagactttaaaccaacaaagatcaaaagagacaaagaaggccattacataatggtaaagggatcaattcaacaagaagagctaactatcctaaatatatatgcacccaatacaggagcacccagattcataaagcaagtcctgagtgacctacaaagagacttagactcccacgcattaataatgggagactttaacaccccactgtcaacattagacagatcaacgagacagaaagtcaacaaggatacccaggaattgaactcagctctgcaccaagcggacctaatagacatctacagaactctccacccgaaatcaacagaatatacatttttttcagcatcacaccacacctattccaaaattgaccacatacttggaagtaaagctctcctcagcaaatgtaaaagaacagagattatagcaaactatctctcagaccacagtgcaatcaaactagaactcaggattaagaatctcactcaaaaccgctcaactacatggaaactgaacaacctgctcctgaatgactactggatacataacgaaatgaaggcagaaataaagatgttctttgaaaccaacgagaacaaagaaacaacataccagaatctctgggacgcattcaaagcagtgtgtagagggaaatttatagcactaaatgcccacaagagaaagcaggaaagatccaaaattgacaccctaacatcacaatgaaaagaactagaaaagcaagagcaaacacattcaaaagctagcagaaggcaagaaataactaaaatcagagcagaactgaaggaaatagagacacaaaaaacccttcaaaaaattaatgaatccaggagctggttttttgaaaggatcaacaaaattgatagaccgctagcaagactaataaagaaaaaaagagagaagaatcaaatagacacaataaaaaatgataaaggggatatcaccaccgatcccacagaaatacaaactaccatcagagaatactacaaacacctctacgcaaataaactagaaaatctagaagaaatggataaattcctcgacacatacactctcccaagactaaaccaggaagaagttgaatctctgaatagaccaataacaggagctgaaattgtggcaataatcaatagtttaccaacaaaaaagagtccaggaccagatggattcacagccgaattctaccagaggtacaaggaagaactggtaccattccttctgaaactattccaatcaatagaaaaagagggaatcctccctaactcattttatgaggccagtgtcattctgataccaaagccgggcagagacacaaccaaaaaagaggattttagaccaatatccttgatgaacattgatgcaaaaatcctcaataaaatactggcaaaccgaatccagcagcacatcaaaaagcttatccaccatgatcaagtgggcttcatccctgggatgcaaggctggttcaatatacgcaaatcaataaatgtaatccagcatataaacagagccaaagacaaaaaccacatgattatctcaatagatgcagaaaaggcctttgacagaattcaacaacccttcatgctaaaaactctcaagaaattaggtattgatgggatgtatttcaaaataataagagctatctatgacaaacccacagccaatatcatactgaatgggcaaaaactggaagcattccctttgaaaactggcacaagacagggatgccctctctcaccactcctattcaacatagtgttggaagttctggccagggcaattaggcaggagaaggaaataaagggtatccaattaggaaaagaggaagtcaaattgtccgtgtttgcagatgacatgattgtatatctagaaaaccccattgtctcagcccaaaatctccttaagctgataagcaacttcagcaaagtctcaggatacaaaatcaatgtaccaaaatcacaagcattcttatacaccaacaacagacaaacagagagccaaatcatgagtgaactcccattcacaattgcttcaaagagaataaaatacctaggaatacaacttacaagggatgtgaaggacctcttcaaggagaactacaaaccactgctcgaggaaataaaagaggatacaaacaaatggaagaacattccatgctcatgggtaggaagaatcaatatcgtgaaaatggccatactgcccaaggtaatttacagattcaatgctatccccataaagctaccaatgactttcttcacagaattggaaaaaactactttaaagttcatatggaaccaaaaaagagcccgcatcgccaaggcaatcctaagccaaaagaacaaagctggaggcatcacactacctgacttcaaactatactacaaggctacagtaaccaaaacagcatggtactggtaccaaaacaaagatatagatcaatggaacagaacagagccctcagaaataacgcctcatatctacaactatctgatctttgacaaatctgagaaaaacaagcaatggggaaaggattccctatttaataaatggtgctgggaaaactggctagccatatgtagaaagctgaaactggatcccttccttacaccttatacaaaaatcaattcaagatggattaaagacttaaacgttagacctaaaaccataaaaaccctagaagaaaacctaggcattaccattcaggacataggcatgggcaaagacttcatgtccaaaacaccaaaagcaatggcaacaaaagacaaaattgacaaatggaatctaattaaactaaagagcttctgcacagcaaaagaaactaccatcagagtcaacaggcaacctacaaaattggagaaaatttttgcaacctactcatctgacaaagggctaatacccagaatctacaatgaactcaaacaaatttacaagaaaaaaacaaacaaccccatcaaaaagtgggcaaaggacatgaacagacacttctcaaaagaagacatttatgcagccaaaaaacacatgaaaaaatgctcatcatcactggccatcagagaaatgcaagtcaaaaccacaatgagataccatctcacaccagttagaatggcaatcattaaaaagtcaggaaacagcaggtgctggagaggatgtggagaaacaggaacacttttacactgttgatgggactgtaaactagttcaaccattgtggaagtcagtgtggcgattcctcagggatctagaactagaaataccatttgacccagccatcccattactgggtatatacccaaagcactataaatcatgctgctataaagacacatgcacacgtatgtttattgcggcattattcacaatagcaaagacttggaaccaacccaaatgtccaacaatgatagaccggattaagaaaatgtggcacatatacaccatggaatactatgcagccataacaaatgatgagttcatgtcctttgtagggacatggatgaaattggaaatcatcattctcagtaaactatcgcaagaacaaaaaaccaaacaccgcatattctcactcataggtgggaattgaacaatgagatcacatggacacaggaaggggaatatcacactctggggactgtggtagggtagggggaggggggagggatagcattgggagatatacctaatgctagataacgagttagtgggtgcagcgcaccagcatggcacatgtatacatatgtaactaacctgcacaatgtgcgcatgtaccctaaaacttaaagtataataaaaaaataaataaataaataaataaataaataaaataaaataaaaattatgatcctttatgtatctttattagtggccaatatatgtatattgcattatgtatacctaacttatcacagtctactggtatcactatttcaccaatttgagtgtagcccttcttccgtttatgtccctttaccatcctgatttataatataattatcttaaacattctcttacatgcatttagaaccacatcaaagagtgttgtttttgcctcaactctcacacataatttagaaaacttaggaggagaagaaaagcttatagtatttaaccatgtttttgcttactatgttttttcttccttcctactgttccacagttacttcttcatttgttttccctttgttaagagatcttcctttagtcattcttttagagtaagtccactggcaacaaattcttagtcttccttcatgtgaaaatggtttgatttcccctttattactgagtgatattatggctgggtataggattcaaggttcatagttcttttcctttgtactcagaaaaaaatattgtgttactttctttgagcctccgtgttttctgatgacaaatgtgatgttaattgaagtttttttcccatataggtaaagtgccatttttctctcactgctttcaagattttttctttgtctttcattttcagaagtttacctatgatgtgtcttctagtgggcttctttggaagtttcctgtttgaagttcaggatttagcttctttaatgtgtcaatttatgtctcttaaaagtgtggatattattcaagcattatttttcaaatactttgccaacccacaccctttctccactcctttcgggcttaaagggatagaaatgctacatatttcattataatctcacagatccctgagcccctgttattcagactgggtaatttctattgctccatgttacagtttactaattctttctgtgcctcttcattctgttactgaacgcatccacttagctttttattttagttattgtatttttcagttctaaaattttcttttgaggccaggtatgatggctcacacttgtaatccaagcactctggaagtctgaggcaggagaattgcttgaagccaggagttggagaccagctggggcaacaaagcaaggccctgtgtctacaagaaaaaattaaaaattagctgggtgcagtggcttgcacctgtagacccaactactagggaggccgagggaaggagaattgcttgagcccagagtttgaggctgtagtgagctatgatcacaccactgcaatccagcttgagtgacacagcaagcccctgtctcaaaaatgaataagtaaataagtaaataaaaattccacttcattcttttttatatcttttacttgtttgctaagactttctatttctttgatgaggctttggggttttttagagcaattttagttaggttcccagcaaaattaagcagaaggtggggagatttccatatactccctgccaccccctacatgcatagcctcgcctgttatcaagatcccccaccagagtagtatatttgctataactgatgaacctacattgacaagtgatatattattattacccaaagtttacatttctttcattttcattttttatgtgtttctagcatgttcataattactcattgaaacatttttatcatggctgctttgaaagtctttgtcagataattttaggatctctgtcatcttggtgttgatatctattgattgtctttttttcatttgttatgatatcttgctggctggaagtatgttgaatcattttcagttgaaagctgggcatttccctatgatatgaattgtacttaaaccttcggttttaaggggctttctctggtatcacaatggcaggggaagtaggatgttctacctcgtttctgccaggtggaggtagaagcccaggttccttaccacactactgttaccacccaatcaggttactacttgggagagatggaagtcccggctcccaacgtagtctccaatgacagtgcattagtgctggatgatacagtcaaagtccaaaaagggattctcccctagacctctttcataagcaccccagtggagagaaggagtggtgcctccttactgccaagcaggggtgaaaatccagactccccatttgtcctgcaccaaaactgcacgtgtgtgttaggaggtggttcttgttaacagcagatagggatgaaagtcctgactgtacttagccttctccaacaccacccctgtggaggtgttgggcaccttgtcatagcctctcaagggtggagtctgggctccctacttggcctttcccactgtgggtggtgggggtgctgcaagtttttgtgtggcgtttgggtagagagaagcaattattgtctaaaagtttctgtcttgctaggctacacattcctgttttttttggcaagagagagcagccttttgttgtgacaaaagcatagacagaccttgaggtgtagaaatgttcaataacctttaccaatatggggactaacttcgcaggattctggtgctgatatttgaaatagatattgttttttgcctaatctggttttttttttgtttcttattgcatactaacactacccccaaaatgcattttgctttttaaattatcttccaaaacgttgacagtttctgtgtttgtcaattactttaatattctatatatttttaaatggatggttggttgggagtctctagacacaacacttcacactaagcaaggctgacagttaagtgatgcggaagccattatctcacctttgtgcttgcaggctgtggcctcttgccttttcctacttcataataaatagcattagcattgaggaactttttaacacctattgaggacagggtttttctaatcccctctcagagaggcttttaaaaatgaatgactaaaacctaacaaacataacatacataaaagagagctatgtagcaatcttacatatgaatttagattcagaaatagcaaataaaataccaacaaaccaaattgaatgttacagtaaaagaatcacctaccatgaccaaatgtgatttatcccatattataaaatatattattgtaatgtatagtatttgttggtccacgaagaaaacatgatagtgtcattagatgctgaaagggcatttgataaaattcagcatttatttatgagatttattctgagataactagaaatagaaagatgtcttctttaaataataaataatagctatcttaaaccaaaaaccgacatcatatttaatatgaaatactcttggcattcctcctaaaatcatgaaagaggcaatcatactaaaaccattatacaattactctagatgtagatattccagacaaggcagtaatatatatatataaaaaaagaagagctgtaactacaaaatcaccatttacagacaatataattttttcacttagaaaattcaagagcattatctttgaacttatcaacagatcagacacttggtaaatatgtaaaacattcatactatttctataaacaagtgaaagctaattagacggttgaattctttagaatatttcactcctgatagtaccagaaaatataaaatacttaggaataaccctaagaagaaagatatagaacctatgtaaagaaaactatgaaattctacagagtgattaaaaaattatttacatgaattaacaatatatcatgttctgaataaggagactgattattttaacaattgaaggtattttgaaattaattcagaacttttatgcaatcccagtcaaaatgccagtggatttacaatattgataaaattattctttagtgtatctgaaagtatacaggcaagaattgctaagataactttttaacttgacaataagtaggaatttcacaacattttattgtgaaaaatttcaaacttacagaaaattttaaatatagtacagtgattatataaacattttcactggattcaacaattgctaacattatgtgacatctgtctacacaaaggagaaatttaaataaaaatgaataaatggtgttctgttgtaaatgcgatatcagctacaaacccatatctttcctttcccttaaaacacctcctcaaaagaataactatatttgctatgagcagtttttaatgtgtgtgtgcatatacacattcatgctcgcttttccctttaactccttattatgaaacatttcaaatatatgcagatatagagtgaatagcctgatgtatccctgaaaatcaggtagttttgacacttagcaacccatcaccaaactagttttatatgctaccccgctactctaccatattattttgaagcaaatccagatgtcatgatacttcatttgtaaatattttagtacatatctctaaaaataaggacttttttttaaaaaacaaagtattatcatgcctgagaagattaacaataataatgtgatatcaaatctccagttcatgttaaatttctctatctcatttttaaaatcatgtttcacataagacttatacattgcaattggttgatatatttcataagactcttttaatatgtaagtttatcctccatctccttgtttttactactttatagtttatttattaaggaaaccgggacatttatcttatagcatttcccacagactgaattctgttgatctcttggtgtccttttgttcctaaaatttcctataaattgtttattagatctgggagattggtttgatcaaattttatattttagcaaaaatatttcatgatttttgtaaaggtttcatgggcacttgaaaaaaaggggtttattttctcttttcagcatacagagttgcaatttcaacagttagatttacctcattggttacgttacatgctttctgagagagagagctagagatgtagatatatagatatatcagctgttatggagttaaaaatcatgaagttaaaatctcatgctaataatatttttctgtatttttccttatattctatagttttgctatatgatgtcaacattgtattatttgatatatagatagtcataattgttagagtatcatcgtagaataaaatatacctgttaacatttctaggtgtcctcttttcccccttctttaatgcttttgtctatttaagattgtaaccactgctttgcattttaatgaacttagaagagtacaaaactgtgcaaaaagtattatgaaaaattatgcagttgtggatttatacaactttatggtattcattcatggatgacacgaaggaaacagatcaaattgtaaatagtgtttaacctccaagtgataggattatgaacagttttaattttcttctttaaagtttttccaaagttttctttggtgagcctgtgttattataaggctcaaaaacatctattttatatgtgtgtgtgtgtgagacggagtcttgccgtgtcacccaggctggagtgcagtggcatgatctcagctcactgcaatttccgcctcccgggttcaagcagttctctgcctcagcctcccaagtggctgggattacaggcgcctgccaccacgcctggctaatttttggatttttagtagagacggggtttcaacatcttggtcaggctggtcttgaactcctgacatcgtgatccacccgcctcatcctcccaaaatgctgggattacaggcgtgagccactgtgcccggccaaaaacatatgatttttacaaaagaaaatttaagagaaagtatgcaaagatagattgattttcttaatattttcagcatagtcttgccacagctgaaataggaagagtattgaacagtctcccttcccccagttttaatcacaactaaaatcatacacatgcatcttccagtgacgcatttgaaatggtgaaatctgattgctagaaattgtgatgtgaataagtaaaaatttactagagtctctgatatgacttgaggattagaagtagaatataggaggccttctgaaaatctgtctcacattcactcaggctgcccttggttttgagccagataacaaacctttcagttgaattttttccatccagacactggcttaaatgaaggtatactgaacttggagatgtcatttcagcatttggctggaagagctgttgtagaggagcttctttagataggaagccatgagggaattctctgagtacatgcattttcacacatctgctaatgcaaaagccccgtgtgagcattagtactcaggaatgtgatgtggattcgagatgatctccacaggattttggcaggtcagaacaaacattatcttgctcccatatgtttttgtaggatcttgaaagggaaatcatatacatttccttaaactcacatgctgaattttcccacatagacaaaaaacaaaacaaaacaaaaaaccatctcagcaaaaataaattcaagaatatgtatatatgatgttcatatatttagcatctgttgtcaatacagcaatgtaagctgatggctattggaattcacatacagtttgcatttactttgatttatgtttaaatggcttatctcagaaaacttgacccaagagataaagactgtgaaagattccacattatgggtaagtcttttttttttttttttgagatggagttttgcttttgttgcccaggctggagtgcaatggtgcgatcttggctcactgcaacctcctcctccctggtttaagtgattctcctgcttcagcctcccaagtagctgggactacaggcgcccaccaccatgtccaactgattttttgtacttttggtagagacggggtttcactgtgttggctaggctggtctccaactcctgaccttaggtgacccacccaccttggcctcccaaggtgctaggattacaggcatgatccaccacacccagccactgggtaagtcttctttaatttctctctacactacatttccttaggtgcagcatatatgtgacctggtgccccacacctccactgcttccctgccaatatcgctgttcccccagatggacacacctctcaatagttttgtagtatttgatataactcggacatattcagtataaaaacaaccagggaacccctgtgaagctaagaaaggattttcaaaaataataatgataatatatactatagacaaagaccctatctgttttttatcacccttgagcaaacccagccctatttggtatggggccttacatggagtgggcagtcattaaatgttgactaaccctttttctaagtcttttttttttcctattttaatttttattgggggggagtgggggtactcagtcccagaagacctaagtcttttaattctctacttgtagtgcctctgtaaagtgatccgtaatctgcccagtattaatagtttggctcctttttctctgcaaacatattattaaaagttgaataaagaaataaatcctgtgcatattggttgattctcattggcatatatgctgacatatttagttttatttcattctctgtgacacccaagaccttctgtagaactgaacataattttgagagaagaatgaccactaatcactatttgttttcatgttttgtgaatgagttttgttgccatagtctcatgtgtctaatcaaattgatcttcaaaccagttctaatcaaatcagttcttttatgtgcttatactacatggttttcagctatcaaatgttatttcaaacttgtatctaggagagagatatatatatatacatatatatgtttttattatttaacatttggagggaagtcagatatctttgatctcatttcttttactcattttgtgtttgtttatttaacaccaatggtttcctattggcttctttagctggaaaaattatttctacaggacaataaaacctgggattctcctccacaaaatgaaacatgaagtgataataccattaatctattaacaaataattgcccttgggttcttttcctggtatctcgagccaccaagatatagcttttacttgatctgaatttgtcagtctataaaagtagggattataatataacaatgcatctttttatttagtttgttaactacattctattgtagaactgttcttatttttaagatcgtagagatccatagaagtattggcattcttgtaccagttattcatatttcactgcatgttagtattttggcatcatttcttacataccctgttattgtttaggggaaaaatgtggaagcatttcttgatattttttcactatttttccctagtgagttatgtagttaatcatattaaactgtttttcagttttgaaatatgagagatttgtcagccctttgaaaaaatggttatagttcattttccatatattactcagcattatgggtctgcctgccaagtgatcccaggtgtgggattgcagcaggtaatttcctgagctgtatggtacagatgattttctgtgttagaagatgctatcggctcacctggcctcttagtgacagagaaatcctttgtttattcatttagtaggcagattaaccctaatgaatattggcttcctggaaatagatacaggtgacaatggcaaagtgaggagtggggagatgtaagacaaattcccttttctttcttcacttataaataatggtggctttcataggagagtgttttaaatcagaaaggaatgcaaaatatttgaactaaaaagatagatttaaataatcaacctttaatttttagttttgaatgtctaggtatgtgtatatttttcagaagaactagagattttctaattttggcaaatacttaaaagttttatgttgccattatagctaaacgaaaatatttaattaaatacttcatactggtttgggcagagctactcacttgaacacgaaaatgctttcctaatatgtccttgtattcagataaattttgtgaattagagaagtgtaacattcatcagcctctctcagcctgtgaaagaaaatgtgcattattctgtgtcctttcttatagtgtggtcatattgcttcaatgacatatttgttttctcagagcaaggatgaaggactaatctaggcatcagaaaattattcatagagttatgctataaactataaaaagttcctagaaataagctattttaaattcattgctttgttatggcttttagaatattgacaaaaaaaatttttatcaatataattttatggatatttgattgtgtaattatcaataatctatgatgaaaatgaaatgtttgtgattgcaactcttaagttttgctcaccaacagagtactttacaacatttttctgtgaatggttttggacatacactattcccaagatgggaatgtatagatacagatgtggaaatctcttaatgttcaaccagacttttccagatcttacagctatgatttatactgcattctccaaagacttccaaaatgtcttcttttacgtaactttatccattagaggaaaagttaaaattcttcccctcctcatgctaaatgctgaagataggcttttcatgataccttttgtagttgacttataaaagctgtagaatttcaaggaagaagtgaaaaaacagagtttacctttccacaaagatttaaaatttacgatttcttctagctatggagttgagattctacttgaattgtgttattgggaattctgagtaatgtgaaatgtatgtgaattggaagcagtaataaattgtgaatgaatcttttgctttttacttaagattactttatccttaaaactaatgtttctataacctctgaccgaatacagaagatccaaaatacttccaagggtgagaatttttccttgcccgttgtgagcagtttaattcattagaattgtgtgtgcgttgtggcatgtgggtacatcagaagtatatttgcaaattctgaatttacatatcaccttgagaaaatgtgaggcaatcctttactgaattgtcagtgatacttattttcagagacattagaaaaaaagagcagtgtatatgtgtcatgttatcgcacgtgaaccactgcctatgttaaataggtttttctttccttttagtgaaaaaccgaaggacaatagtcattatatgattttgtattttaagtattttcataatccaacataaattggcccacccaaggattatgtctgttttataaagatgtgtttatatagtcattgggtgaaagattgcagaagttgaaccactagttttgaaagttgagccagaccaggaaaaatcaggatacaatttggcacttatggagacgaaatgatttcctttttagctgctgatttctactgggaaatgtatccttggactgaaaattgcatccggaaaaatgtttatgtagtgtttttcaaatgactgattattcttgtaacctttaacatgaactgtgtctaattttggtctctcttaactctttcacgactaggggatttttctttgtgggaaaaatattacaaccgtatcattactactttgaatacaggaatgtcttacatggtaacaagaatacaaaatgtgttaagatttctttctgggttatttttccaagcgggtagtagaacgcccaaggttatacacccttcgtcacaggcacttaagttttagattgcatttaaattaggatacatctcgaaacataaacaaaagaaaaaagagagaaaaaaaaggatacatctcagcagctgcatctcttccacttcactaccagctacacacatgcagtaggagcttcttgacattttcatgggtaatatttggtcttcgcaagtatcagtacttctctattttctttcttgtacatttagtgacttttctggctaaattattgctgaatattgtccgtcgcagattgaggggtctctattccatgttatctccattcaaggagccaggttagcgaaggcttcaccactgagttattctaggtaaccattaggtttataaatataagagtgttttctcgtgtaagtgagggttttatattactgatgtgatgtgtgagtgagcagggataaggggacactggacatctcatggtggtcacttctgcttacaactcatgagctataattgtgctgtccaatacaatagccactagctgtatttttttaaatttagatttaaaataatgaagataaaatgtataattcattttctcagttgcactagccacattatcatattagacagtacaaggtttagaacatttttatcatcgtagaaagttctgttgcagactaccaggctagaactttaagaggatggggaagtacagctatcttgtatgcccagaggtgggaaagaaggaaatattaccaaacttcaataatgtctgtcatcattggtaaactgtatgcttgaaaattactcctcagatcctctatatcctgtttttctgtttttgggggagtggaatagggaggaagggggctacaaagttagttgggtgatataaaaaaaaataatacatatacacacgaatgcatacatactgcttctgtgtgaaaaaagaaaacttaaggagtacatacttgaaattaacattctgccaagcaggagtcattctgttggatgccttcctctgaaggaagactgtattgcatttgtgtggctttggggaagacattcagcaaagaacaccacaattcccattgagctcagaaaatgtgattaaggagtttgaatgtaattacccaaagtttggcttttcttttaaagaacccattcattttagagattccttgatactgtaaacctgacaactcaatctggttttcttttaggaagccttccaccaggaatagtgtgagtcaaggatgagtacatgaagatgaagcccatgcaatgaggacagcctaggccgtgttaggctttgacttaaatcagatttcatctacggctgagatgcagaggagagacttagtgaaatatgcagagctccattccagttcctttcttatttgtttgatgtacaggcttatttaagtgaaaggtgggacaccagtagatatacattcagacaaatcaccctgcagttattgctcaacagagtaataataatagatttggagaatgttctgtgttttcaaagacagaggttaacaagcaatggacaaaccttccgttcttctctatcccaaatcgtttgaatcgtttgactgctatacacaatccccagcacttataaaataaaaaaagtatggagagagagaaagcaagtaacccagcagagtttgtgacagaaactgttagccctcttttgtattgtttctgcatcgtcctgtcaaacatctggaaaccagcatattggcagtcgtctcacaacatgattttgcatttacatcatcgtgctagctggtagaattttttcccccaggaaaaaaaaatcggcaacttttggtctgtcacaaggtcaagtgatgattagtgatgtagtctctcctaaacacatggttagcacagaaaatttaaatcagttccccaaaatttggtaaccattaaattacttcctaagtcacttccggatgtcaggcctaaggtggagagggggacagggctatattgagttctccgcagttttctaacagagagatttagtttggcagctgatccagccaaggaaacgctcacgcaagggcagagctagacaggaaacacttttgaaagtgctgttttgatagaggatcaggagatcaggcaaagagctgtgaactttatgtgtagcctaggccatgtagcactaggctagccacctgagggtatggagtaagaaaggaaattaaaggagaagggccagagatcttacaggcaattttcttttctcaaaagagcagtgctaaaaattatgaatttctttgaagtagaggaacataattaatgaatttctttgttgttgttgttgtttgtttgtaaaacattctgccatcattattcacctttacatttttaacatgattgttagcttagactacgagagctaacctcacccattctaaccacctttttatagctctcagaagagctgtcttctaaggaaaacactgcactgagcaaaggttgtacttttgtaagatggacgttttataatgataagttttgacaacttgctctggttgccatgtgtctcccagtcctgctggtgggtgggtatttgtcaggaatgagaatacgtctgagatggtctgctttacagcagccagtcttgattttcaacttccagggccttcggcatccttttggctctgtaaacatagaaggctttgctgcccttggctgtgctgttggagaaaaggagagcatcctgtttagggaggtgccgatcttcagtttcagaaccattgtttgacacctttagttcctcccgtggacttcatgtccttccttgtccatagtttggaacttacaatctgagtattccttctattgagctactcttcaaggtctacagaagccatttttgtttataaagctgtaatttctcacagcagatcatttcattatttctgtcttaattacagaatttcaaagaaaaataaaatccttatctgtacttaacaaagactgccaacacttttccatagaccaccaatgattcttgttttgtagctttttgtttataaaggcaatgttgtattccacagcatcattacacactgcttctgtgactcagacagctggcaggtccaagatagagcatatggatgatgctctaatgacatctgtccagttgttgtaatcacatatttggtggacagctaaaagacccactttcaccttaactgagtttatgtgactaattttaaatttactgtaaacacttttttatacgtctcatgcttattaatacttaataataattccacaagtatttctctcaattctaaatcccagagcaccatagaaactggcaaaatatcttcccaattaattatgagaaattcatctgtacaattttcttattaattctcgtatccaaaagaaccacaatacaacccaagaccccaatcattagaataaccacaaaaccgattcttaattacctcttgcctgggacactgcagaagtaaccaaatcggtcccacaaacataagcctctctaaccctgccacctcccccagtttatgttacgtaatatggtgagaatcttcttcctcaaatactttttatcctgtcatccctgttctcaagaatcttcagttgtatcccattttacaccaggaagttcaaatgtttgaatggagatttaaaaagtctagctatgcttcttgtacatcccctctaggagcacacccactctaatcaaactgacctttttagtttagctgggctccaaccagttctgttctagctcctgaagtcagcgtcaagaaatattggtcttggccaggagcggtgcctcacacctgtaatcccagcactttgggaggccaaggcgggctgatcacttgaggtcgggagttcgagacaagcctggccaacatgcaaaaccccgtctctgctaaagatataaaaattagcctggcctggtggcgggcacccgtaattccagctacttgggaggctgaggtgggagaatcacttgaacctgggaggcggaggttgcagtgagccgagattgcgccactgcactccagtctggcagacaaagcaagactctgtctcaaaaagggggaaaaaaaaagatgttggagacctaggttctagagtaaactctgccactacctagctaggttgacctttaacaagtctatttaactttttcttaggttatttctaagagagtttcaaaatgaaaaaaaatactatgtgtttgtaattttatgattataattccatttaagtaaaataacaaaaataacactcgtatcatagacattagagagttcttacttggaaagtttcatttcctaatgacatcactgaaacagcaggtatgacagagggttccctgactttgatagttttaattatcttaatttatcctctgttcctctgccttgggcttattaagttttgaattaggtatgaaaattattaagccaggggtataaattacaattcgttaaataaattcataatatattttatacgcttaaaatgaaattatattccaaactcataattaagtatgaacaatttgcatttgagattttaaaataaagcctaaacatcggtcccttccttcttcattaatttatttctccataaaggcctttcttccttgaggtctgtgagcctccaggcctttgcagcctgtagtggtctgcacttctctgtttttctttccctgagagtgctgattagtgacttgcggtgtggattctgatttatcgcagaccagagctgccccttaggggctgagcagaaacactcatgaaggagccctgattaaaaagagtggtaatgaagacaaatgtttcagagggagttgagagaaaaccagtccttggcattccccatagctcctctgagcttttgaaaaggaggtagtggtagccaaaggaaatatttcttctttgttgtttatttctcatggcactggaaacatttttcttttcctcttgggtgttctaattctcacttgttaactgcttttcatgcagggttgcaattaacccctggcagatacctcaccgtgttctccttatagccactctgtccccaaagaagtttttaatgctttgacctataaccattttaaaattcttcagacttgacacttgcctaatttctcagatcattaaatcacacttctggttttttccagtgatttttactaaatttgatgttaggtacctataattaccttcccttcttcttatttttacaagacagaatgccagcagaaaaaaacaaattcctgttcacttggtaattttaaacacaaccaggtcaaaagtttcaaatctagtgttaagtccgtaactgaaggcaccattccaaaactacttgagtataggtgagaacttgacagataattatggttgcttgacctgggtcttggggcatctaccaaatcttaatggtagtctcactgtctgtggccatgtgagctataatctactgccctggtcaaacttaaccaaaattctgttttctttcagaagattccctaacattggaataaatggtaagaatatagattgtttgtgccgggcttatacaatgggtctctaaactatattgagtggtcaaaatgccacattcagaatacttagagagggagaaagataaagtgccttggaagccgtgaaacattctagggagcaagagcacaccactgtacatgctcctggtttgtgtgctgcagactgtgttaaatgcagaggaggcaaggtggagagaaggaaagacaagagaagtggaagatagagtccactcccctatccccgtcaatgagaagaagctccttaccaggtctgtgtgggtcacggggcaagatcaaagaatccaagcaaggttcataaaatgccaccacccctgattcatgacctgacctactgaaaggtttaacttccagaggcaggttgtggtttctgatccaatcaagtggattccttttcttggagaaagtctcactgtactgaaagaatcttgtcagatatccaaggctaaaggaaaattttaaatctaatccaatcagatgaagaagctgataaaaaaggtataaccattagtgggagagcagcatttaaaattctctctatggcttttctgggctttttacctctgtctcaaccaaaaccaaaacaaaaccccagaacaacaacaaatgagttgaatgttgctcagatttggagtatttgatgttacccctttctgatgaacgtctgagattaaagatctgcattaaagatgaaatagaacacactaagaaaagggttgggtaagaactttcacacatactttgtttctattgaggttgggtccatcttgaagatcagactcttccccaaatacaaaggcaaggtcagggtctgagttaggctaactgatgtcaagtacaagttctgtaggaaaaaacaaaaattgctgccactcatctaccaagagacaaagatttaggctgctggactaattgccaagtttgtaagattacttcaggagcaccctccaggctagtagaattccgtgcaaatttcaaccatttgacattacttccctgttaagtagggaagaaagacttagtaattttcaggactgaaccaaattccccctcaagtattgatacactctcttcccagtctgaaatactggcatactgttatttatttttcctggcttcaaacaggcatattaagatttcatggatctctgaatctttctttgaggatctgggaacacatcagaaaaaccagatagaaaagagggaagaggaaataggttatttccttagcctcctgaagcaaatgaattggaagggtgctttctgtgactttcattggcctgcaactgcctggaatctcaaaaaaaaaaaaaaaaaaaaaaaggaaacccaaaaaaccatctttgattccttactgtgtaatcttttaacaaagtattttgcaaacatacttagcatgtgattttcacatatgtgttccaaggagcaatggagcagagttggagagatgaaagcatttgaagactgcaaagtaattttaaattgagggatgtactaacaaaggagtcatatacaaaaagggaggagaggtagagttggcctgatgtggaaaataaatatttcatatagtctgctatagtctggccagtatgaattaaataaaagtcacattcataatgaacactggagcaattatacatcctaaaaagaaagggaagaaataccatttcgtaataagaagatgaggatcaataatagtagtgaacacttgttgattttttaaaaatcaactgttaggcactgtgctcagactttatgagcattgtctcatttttcatcgttttataaattaggaaattgaggtcttgtgaaagtaacgtgcctggattgacacagtaagctggtggaatgaggattcggaaccacgcatgtctgactccagagccctcgctttttacaccagcctctactatctccctgtgtgactctggtcagttaatccatttataaaatgagagtattggactgagcaatttctagatccttttggttctagaattataggaaagtattttaaagtcgagagaactgtgttatggtgggacatttagagacaaactgaaatggtgattgtaatgacatttcaagttaatgatagctagcattgatggagcctgtactatataattatgtaattatatttacaaacacctcatttaaccttcaaaacaatcctttttgacatcagttttttgttcctaagaaaagttaagtaacatctccaaatcacagaactagaattattcatgaagagtcagccacatcaaagatccaaaacacgggttttaagatttcaaatggttaatactctacttttctcttagattgttgttttgtttttttttgaaataaaacatttgtacaagtcagtaaaagtgatatacagtatttcttcaaaactggaatgttattagagttcttgcttgaaaatagttccaaattaaacatatgaggtttccagtagtttgaagactttagaatccgacttgagatcaaatcggaactgagacagtgaggtcacctaaactgcgacgtgtgaagtgccctgtttcatgcttcttataatgacatgataaggccattagtattatctttattataacagatgattataaatggtacagacttggtttcttattatctggtactttttgtcacttagccctaattttcttaattcaaagacatattctgttagtactagggagcaagtttaagactgactttgccacactaatcaaattacatcagtgtcaagtgctcactaattaacacaaaatttatatctgcattaggtaaatgtcatttcaccacagtggcctgaaataagctttttattcctttgaattagcataccatttcattgtaagtattacaaacaagctaatgacaaaatttaggcccatgtgcatttgttatttagctggaaatagccagaagacagtcagtacttccaaagatctgtaggaaaatgccctgcttcattttttaactgatcagctagctgacttgtcaccttgaggtcctgtgtgtacatcatagaagggcttagcagactactgccaccccctgtctatatgcagcccacgggctagaacagttctcacatttttaaatgggaggaaaaacatcaaaagaagattttatgaaacctgaaaatcacatgaaattcacatgtcaggctcataaataagttttaatgcaacagagtcatgtctgttcacttatgtattatctatggctgctctccctatgatggcagagttgagcagctgtaacagagaccgtgcggcctaaagatacttactgtcgggctggttacagaaaatgttttccaaacagaagctgtattccaaattctttcctaatgtggcatacaaagcctttaggatctggctcctgtgtgcctctcctgccgctgctgctgctgctgctgctcctgtttccgcttctgccatggccaccgccactgccgccgcctcctccttcttccctgcaccccttcgcgcctgccttccccgcgaccggcagcctgagctctaacaattctcaactactagcacctcttagactccaaaatgctttgcacctatttaaatgttttcccgtgctcttccctctacataaaatcatttctttccatcctgagtacccatggcaagctcctatcttccaatatttttacttaagcatcccctcttcttctctgcacctggagcatcttggacatagctttgtttccaccttgcattcacccactagacagtaagctttttcaagacagatactgtctcttcttcatctctatatctgtagaacagggtttctcagcgtaagtactgaaggtattttggactggacaattctttgtgtgcagctgttttatgcatcatataggatgtttagcagaacccctggcctctacccgttagatagcagcacgcccccttccctcagatgcctccaaatattgccaaatgtccccttgtggacaaaattgtcccatttatttattgagagacggaggctggatgttgtcgcccaggctggagtgcagtagcgcgatctcagctcactgcaacctctgcctcccaggttcaagcaattcttatacctcagcctcctgagtagctgggattacaggtgtgtgccaccacacgcagctaattttgcatttttagtagagatggggttttgccatgttgcccaggctggtctcaaattcctggcctcaagtgatccacccacctcggcctcccaaagtcctgagattacaggtgtgagccactgtgctcagccaattgtccccatttaagaaccactaccctggaaaccagcagtaaccagaccctggtgggtgctgagaaaatgttgaattattcagatagttgattcacattgaattgtatacatcaaatgtaagaattatgaattacatttcaataaaacttttttaaaaaaagtattggtttactattagttattattagtggcattattatgaggtggtttccatttgttttcctcagtggccaccagtgcaactgattttgtcatatactgtactcattgatgccaaatatatatatcttatttaatgctgacttcaaacctgggaagttgatttgtttatctcttcttaactttttggaaatgcagacacaaaaagattcagcaaattgcttaaaatcgaggtaactagcaagcatatatcaagggatacatgactcggcttctgtctagtttcaaagcctgtactcattccatctgaccatgttgcttccataagccacatgccagccacataatgaatttcttgattagaatacaatgcatatacctaccaaagatagtatgtgcatatagcaaatatgagcaatttctaaataatgggagcattatttttgttcaaaatgctaaaaactggggccaggcgtggtggcacacgcctgtaatcccagcactttgggaggccaaggtgggcggatcacctgaggtcaggagtttgagaccagcctggccaacatgatgaaaccctgtctctactaaaaattcaaaagttagctgggcgtggtggcacacgcctgtaatcttagctactctggaggctgaggcaggaaaatcacttgaacccggaaggcagagattgcagagccaagattgcaccagtgcattccagcctgggtgacagagcaagactccatctcaaaaagaaaaacaaaacaaaatgctaaaaactgaattatcagtagaacagcccatgtactctgtggacggtgatgggtttttgttttgtgggagttgttgttttggttgattcggtgtttcctttgagtccactgaggagccactgttttcttccatatctttagatcctgatatggtaggacatgcacaatctattttgaatcatcataaagattgaattttcagcctacaaaaacaaaagaaaattcttagggcatcagttctcatctttcagatagaacctaggacctgtgaggctggtaatctttggaatagcactgtatggtaaaactttctgtgataatggaaatgtggcgtatctgtgctgtccaatataatagtcacatgtggctgctgagtgctgggaatgtggctgttataaccaaggaactgaaattttaaatttcatttaattttaattgatttaaatttaaatagttgatgtggctattggctatcattttgaatagcacagctttagaaatcttagctttgacaaaaaccacaaacttaagtttatccccagcaaacatcttaggtgccagagacggcagatttggattgaataaattatccatgttgagtatctacgtgggaactcctagttatacagtgcagattcagagattactgttgtaccttggctatgtgacttacacacagaccaaattactctgctgggggtaaattcatactccagtgttacttcaacatttctgaacatctttttgtaagcaattttgcattttttactgacttgattgttgtagtaattacaaaataaattatccatttagggggcagtgttgaagcattgaggaataaaaggataaatgtggtatatttgattgttttcagtgtttaagaactcttattggaataagagacttactttattgaagtcttataattttttactagaacatttgttttttggctcttgatccaaatgacagctgaatttaggaattcagcagaaaagtaacaattctttttgggcatttttctgattatttacttggaaattcagaggattccatgtcttggaatattttttttcatacccataagatttgaatggtgaagataagaaaattataataagttgataggttttcatcagcagtacattcttaaaaagaagaaaaatattttatttcaaatgctatcctgaattagctgtaatcttcaagttatttttaaacccactttatgcttttgcttacatttgtttattaaatctattagatctagaaaaaattagagacagagatgaattttttattcttggattttcaagaattgttatctttttatttatacctattttccccctgtacttgtattgctagtgatagaagttctgaattacggatacattcttaggcttaaagagtacacattttttcccttagagttatagatgatctaatctaaaaagttggaggacttaaaaagaaagtgtgaagatttttttttcttcatttcctgatttgcttctttaaggaagtgcgagaaggttaaagatgtctgtgatctggccaaacgaggttcacaaatgctgttttcatatttgtggttttggtgtttcctcttacacatgtgtcttccttcttcagtttctcagtctgtcgagagagcatggctgcaccctgtgcattctgggcacacatcatctgggctcagtgcgggctttgtttatagcagaagccataatgtataatgttcaggagtgggtgagctacctaagaaactccctttgaaggattccttgtgtggactgcttatcagaaaaagtgtaaatgctattattgactgtttcctagaactcatacatgcagtatagttcagtgcgattaaaagtcatcatgctacatgatgtagggaatataaaaaatgaagaaggcatgctccctggcccccagaaacttggaattcagttgataaaaatacaaccctagtgaccatagaataaggcagatggagttctctcagaatgcaaagaaaggtaaaatttgttgtaatgggtgatcagagaaagttttatggaaaaaatgccgtttgagctagaatttgaggaatacgtggaattttggcaggagaagattgaggaaagggatacctactgtcaagacacaaagtgatatgaccgggcacagtggctcacgcctgtaatcccagcactttgggaggccgaggtggatagatcacttgaggtcaggagttcgaggtcagactggccaatatagtgaaaccccatctctactaaaaatacaaaaaattagctgggcgtggtggtgcattcctgtaaacccagctactcaggaggctgaggcaggagaatcactggaacccagaaggcggaggttgcagtgagtcaggatcacaccactgcactccagcctgggtgacagagcaagactccatctcaaaaaaaaggaacagagtcaccaagacatacacatactggaccaatttgggaaagtacggaagtttgctttgaatatatagcaaaggatatgtgagggatagctgtggaagatccaactgtcaaggaaggttaggaccagactctgaaagtagagtgctggtgggagatgtggaacaggggacaagagatggaaggttttgagttggggaaaagtattctggcagcaggattgaaacattaaagaaaagtaaccctgttaagtggttatcacaatcaaacatttaccaagtaatcactgcaagtggattcaatttgtaaagtcacataaaagttgcttatctctccactttttttttttttctggagaaacagcactctggcatttggccatcttagtatggcctttatataactttggaatgcaaaagaaaagagaaaactctctttgtaaagtcaattaaaagctaattgtttgtgattttttaagttaataaatatatatttacatagtttatagttgttacataaaactttcatgttcttttccttatgaaatgactctatgactttgggcacattacagattgtaatgtagtggattgatggtacatgatttaagggaaatcttgtactaatctgcaagtatcctgaaaaatgttaagtaaggaaaaagcatgcctccctgtgctctttgtccatttgagtgttttttttttcccccaaaagtataatagtgaaatggggcaggcatgaagcccgtgagagatcattgctaccacttctacttttcattatcatgtctctttatcctgattcacctgtacagcgggactaggctggttcatttcaacacagtaatgagtattcatcctctgttgccctaagaacttacacctactggttcataaatggtcataaatgttcaacatttacgaatttatgttgaagtacataaattcttcaacaaggggcctttacattcatatgtagggcatttggttgcttaaatattgaaacaattataaagaagttaaattaggctgggcatgggggttcattcctgtaatcccagcatgttgggaggccaaagtgggaggaccgcttgagaccaggaatttgagaccagtctgggcaacataccaagactctgtctacaaaaaaagtgttaaaagtaaccaggtatagtagcaggagtccatagtcccagctacttgggaggctgaggtggaaggattccttgagtccaggagttcgagactgcagtgagttatgatcacaccacagcactccagcctgggcggcagagcgagaccctgtctcaaaaaataaaataaaagttgaatcacccacgttttagattatgagcttattaaaacttaaacaggctgggcgtggtggctcacacctgtaatcccagctctttgagaggctgaggtgggcggatcacgaggtcaagagatcaagaccatcccggccaacatgatgaaaccccacctctactaaaaatacaaaaattagctgggcgtggtggcgcacgcctgtagtcccaactactcaggaggctgaggcaggagaatcgcttgaacccaggaggcggaggttgcagtgagccgagatcgcgccactgcactccagcctggtgacagagcgagaccccacctcaagaaaaaaaaaaaaaaaaaagttagacaattatacagagatactcaagttcttgaaagaagtttgttgaggataagatttatttaaatggagtagttttactcttatttccactctcattttctccttttccccagatatatacaccttctcatttattggtgtttattacatgtaagattctcttgttttatttttttttaatgagctaagtttattattaaggtacttggctatgtactgtatataccttatctcattaatcttgttgacaatctgctaggtaattgttattatttccattttagagacgaggagacaaagacttaaaaaggttatttgcccggttagtaattggcagagccaaatttaaacccagatctgtacaattgaagctgatgtcttaactactatagtacagcggctttcttgatgctagatgatgtggccccagttttggtaatggaggaatactgatccaatccaaagtggatgtttgcatggaggagtcagagaattttaagaatgaaagggtacatggaagccatcagccctcatgtaaaacaaaagtcctgtgtatctgataaatgttctctgtttaactagatttgtatagtgccctgggagtactagttagcattagtaacaacattctggggcaggggagggtgggggaacgtatcatcagaaaaaatggatttggggatatagaggtgaaggcaggaagaggcagtcatatagaatgatgtgcttggaagatctctgccttttcatgtactgcatctgacaaaaatggatttgatgacatctgggatttgcttcaaaataatagaggaggagggaagtggatttggatgtggatgggacgggattggcctggtttgatggttgttggggttgtatgatggatgcatgggttttattatgtttttctattttgatgtatgttcaaaattctccataataaaatgtttttaaaagttatttgaaagtactgtttccatgattttatagtggtcagattatgtatatgttttcttatccaaaattcccttggtttttctcagaagctttttcttctagcatttgttcccttttagaatctccctcacctctctttctgattatttattaaaagaactcaattttttcagtgctgaaggagaagttaactatcaaatgcccatatagctacagtattgggataatttatctaatttttcttatgagtaagttctctttgactttatttttgaactcaacttgcttgcattgttcttgttagtaaaaaacattgctaggatgtacttagtaattggagtcagctgcacttaagactgttcagccagactgttattttagccttcactagtagggtttttaacaccagtttgaccttactttgaaacattctcaaaataccatactttaatatcaatttatatactttcatattaaggcagggccgggtccctggggaaaaaaataatgaaatttttacttcccacaaatgtagaataaaggtagatattctgattttgttttttaaagaaaaatagaggtaaagactttaaaatttttctttggtcaggacataatgcttgcaaatacattctaaaatataagtgggccaggcatggtggctcacgcctgtaatcccagcactttgggaggctgaggcgggtggatcacctgaggtcaggagttcgagaccagctggccaatatggcgagaccccgcctctactaaaagtacaaaaattagcccggcatggtggcgtgtgcatgtaatcccaggtactagggaggctgaggcaggagaatcactgaaacctgggaggcagaggctgtagtgagccaagattgtgccactgcactctagcctgggcgacagagcaagactctgtctcaaaaaaataaaataaaataaataaagtataagtcacagaaagataggacacctacaaattaggggtgctggtttcattggccagtgtgtcctaccattgctttgggatagagactgaatcctcagtgtgaagcaccaagtagatggtgattattcatgaaatcagaaagaattttttttctgaaatactaaattcccataacctatgcaaattacattttaggcaagtaatgctcaaattttctataagtgttctgaaaataagttataagtttttgttcatttcataggaggacagttgactcctttctactcttttttttgccgttgtccctattttttgccactggtaaactcctgcctagaggaatgccagaggcagaataaattttggagcatggattttttttttaaggagggttatagtatcctgaagacttcatttctttctctgaagacacaactatcagcaaatccatataaggcaagtgactccctaccatctcctccgagtcttctacgtgtatgtctagatactatgacagatccagtgcctgtgaagacctggaacatttcagacaatcacacagatgttttcttatgctatatataggaattaagcaagtgtttcataatgaagtgtccctccaagcattctctatcttctggtaatgcaaaagtgttagacatccagtaagcagccctttttaggcctaaaatgttgactactttatctctgttacctttctgaaatgtttggcctaatattttttataacatctctgtgaaagtttgaaaatttatgattgttgatcctcaatagtcaaaaaagtagtcatttaacaatacaatatttctctcgtgttcttgagcatgtatttaagttagctttagttaaccctttattttctggacttcttcaagtcagctctcagaattgtttttacgggttgctgaggaagctaaaggtcaaagatattttcttagtcagttgatttacctcaaagaattacttcatgtagattaactgaaataatgatgctgctaagattcgcagattaagatcattatagcatttgagtaggccctcagtgacaaattgctctaaacctgtttggctcaccaccataaggtttaaaacataaaaatataaaagtgcttaaaattttctttctgtttccttatcagaaatattcatttagaccataacaactgttagaacaagataacaactccaggccagctgtcaaatgtttaccattatcaaaactctccctggagggagatgcaactttggctcgcctcaccggcagtaatttaatttttccttcattctgactcggaaatggcagcatttttcaaagcttcctcccactgatggctgaaattttccttgtgaaatgatttccaccagtcttgaatctttcttgtttctgccgtcttcacctttgctgatggttctgcaactcatcaccagctatgcaaactgacagttcacatcctggggcagcagcggggtctggcctgcagaaaggagcagcctgaccaaatttacgctcacaagatctcttaattcacaaaagcatttgctctagttcctgttctctgctgcaggggctacggagagggagtgggggctgggggaggaccattgggagaatgttctgaggagaagagaggctctcttcacactctactgagtacacagactttggagatgaaaaacagacggagagaggcatttccaaccatcttgctgatctgtgcaggagttcattgaactgtacagcacagcaccagacccttgtgtcatttaatgttactttaaaaaattattcttaaatgttcagcacaaatatccctcccctttttacttaagctgaaaaagaatataaaaattaaagagaaattgaaaatctaagtcttgcagtgagaatgaccagaaatcgtttccctctctggggggttcctgtttaatatgaaagtcctcttaacaagcgtggacagaggaagttttaggtttgatttgaacttcatgtacaagacatatttcatttttttttcttccctcacaaatttcaacccaggccacttgtttgcagagactgccaaaccttccattgccgcttccaagatactcctggaatctgagattaccttttatcctcttgatggaccatgttgttatttttgtcattttccctgcagctcttctgctttgctggggaggactcatccccctatgcatcatctaccccccgatagctgacacagtactgttcacaaggttacttactggttttttgtttttttttttttgagacagtttcacgctgtggcccaggctggaatgtagggatgtgatcacggctcactgcaacctccacctcctgggctgaagtgatcctcccacgtcagtctcctgagtagctgggattacaggtgtaagccactacacccagctgatttttttttttttttggtgttttttgtagagacagggttttgccatgttgcccaggctggtctcgaactcctgggttcagggatccatccccctcggcctcctaaagtgctcggattacaggtgtgagccactgtaagcgactatccagccaaggtcgcttacttgtgtaccagtttgggtcactctgaaaattgctttgaaatacttactgtttaaaatgactgagctcttaggagtgtttctgccctctccccacaaccctcaaatatctaaaacaacctaatcaaattggtagttttcatggctttcaaaatggaactaaaattaaagtaaaaatgatagaatcttgagctagagtggcagatttgaattctaggctttgctggtccactgatgatgttcattttctttccttgtgactctcataatcagagtaaaaagatgagattgtaagtgataacacaatccattcagaatgtatgactttgctgaattgaggttgatctttaagtgtgagtaaaatgttatgcaaattggtagtttaaataatatttcagaggggaacatgcacttgctagagaaaatgaaaatatttcaaacccacttagtttttttaatggcagatgtttcctttttttaatttaaaaaaaatttttttaagacagggtcttgctctattgcccaggctggagtgcagtggcgtgatcatggcttactgcagcctcgacctcccaggctcaagcaaccctcccgcctcatcctcccgagtagttgggactataggcacacaccaccatgcctggctaatttttttttttgagacagagtctcactctgctgcccaagctggagtgcagtggtgtgatctcggctcactgcaacctccacctctcaggttcaagcgattctcgtgccttagcctcctgaggacctgggactacaggtacgcaccaccacacctagctaattttttgtatttttagtagagacggggtttctccatgttggtcaggctggtctcaaactcctgacctcaggtaatccgcccgcctcagcctcccaaagtgctgggattacaggcatgatccaccgcacccggccatacctggctaatttttggttttggttttgtagagagggggtttcaccaggttgccaggctggtcttgaactcctgagcttaatcagtctatccaccttggcctccaaaagtgctgggattacaggtgtgcaccattgtacctgggccaacaggtgtttcttgtatcaaagtagcgctaatagatttctgtttctcaaagtgttctcaagtataactcacctgcttccttgtttcagactggccatttccctaattgcctgaattagcggtgtttttatattctcaataaagctttgggggatacataccttagaaatgtataagttggggcggggcaccgtggctcacgcctgtaatcccagcacttcgggaggccgaggtgggcgggtcacctgaggttgggagttcaagaccagcctgaccaacatggagaaaccccatctctactaaaaatacaaaattagtcaggcgtggtggtgcatgcctgtaatcccagctactcgggaggctgaggcacgaggatcgcttgaacctgggaggcggaggttgcagtgagccgagatcatgccattgcactccaatctgggaaacaagagtgaaactctgtctcagaaaaaaaaagaaagaaagaaatgtataagttggttgggaatgcagctaccaatacaagatacagtatgtgctaaattccacaaggaacattgttgacagtaagtgctataggaattttagataagtagagacactcagaaggtttagaaaactgtgtgtgtgtgtaatttatattaatacatctcacacacacacacagaagtttttgtattatttccagagcttgatatattctctgcccataaaatgtttagctgataggtctgtgaaactgccctcaaatttggagccaactcattttatttggtgtagtagctcatataatagttaccttttattgagtacttactatgtaccaaccattatgtgccagacactgttccaaacactgtgttaaaccacttcatggaacattcaaaaactcagaggctacactggctggatttaagtggtgggggttatacagcaaattacctacatttaaggttgctgctgccgtttcattccatgttgccaactgcagaaatgtgggctccgtgttcccagactttccatttagtcaaaagagacaggaaattcacatttttatggatatttcctgattttttaaacactacaggctaactgaaacagtttgtgacttttgcattgtatgttccactccattttatcctcataacatccctacaagataggtataattatttgtatttgcgcactctcaacacagctaatacagagcaaaagtagaaatctactgcaggtctgtctccctccaaaaactatgttgttattgcgcttcctcatctggttccctaaactcatgaaggtggtactgttggcaaaaaaatgtactgtttggttaaagccaggcccttaacaaaattatcaaacagcatggtactgtaccacagagtgccattttccagaaaacagttatttatggctttgggagaattgattgtaacatgaagataatgataactgcaaatatcaaacaaaagctctgttgactttgctccagattttttatttcaaccccatggtacttctagaaaaggcacacaaatactctaaattgttaacagagttcttcaagtttctcaaagagtggcaaaaatattagtggcaattttacaaagcctgaccttgccagaaagagatatcagtagttctcggtgtctactaaatatttaatcacttttattaaaattctaaatgaacttagacgccttgaggagttaatgcacctccacaaacctgctttccgctggtaagatcaggcccattattattattatgtacagctgtaaaaagctggttccatagcataaattgcgaaatacttaggcaagaagattattcgagaagaattgtattgcttgttcagttatatattttgatctttatagctagtagttttttttctcatgagagttggagattaaccttgcttttaatgtaaaaagtatatcagtgagggtaaaaatagaaaatgaaaatagatttttaatggcaactttggttcttagcattaattttacatgcatttttcattctgaacttttaaacagttttgagaaacatatgagagatttgtgaacaggggcaagggagggtcaaatgtatcaaatccttggattccagcaaatgtaggatttgtggaagagctgagaagcacacatgtgttgggaatgtaaattaaaataaaaccccactttgtgaaggctttgaaaagagagtgcaccctgttatggcaaatgtctgaggcgtttgtcttcttaataaattaaccaaatattaaaataaacattacttttatcagcctgcatttttcctctctggatgaaagtgtttcaggaaaaatcataaaagaatctatggtagctcagagaggttaaactcaacagttgttttctttgaagtctctggccatgaggttaattgccaaaactgcttgtggaaaaggtggtaacaatttaacaagactgtacaactgcagagacttagatgaatatcaggtgtttgcagatgttttttcctaacaggaaagggggtggggaggagaggcggaacagaatgagaaacaggggaagagagaggcctgaataaagtcccaactaaacagccaataattctttgtttgcttagccaatcatcctgtaattggccaggaggttaataggagtctattgattggtcaggaagattgcttactgtggctgtttttacagtatgctcccagacagaagactgcaattactggagctctcattcccactctttagggccatggctgctctgatttatgaaacccgatcaggttgctgttggcagtttatgttttaagtgttgccttctgggtctttgctgcttatgggtcactgtgctatttctcatcatttattgtggtcatttgaataggtaagcttatttatgacttactgaagtaggaatacattaaaagtaataaccaccacccacgtgcactgaaaagtgggaacaatcgtacaagatgtgtgacagagctctgcttgttctagaaatagagattctgctaccagtatagagtttacaaaagaccaggaaataaaataatacagcccttcctttctctgtcttcaacagacatgtttctcaactctcctcattaattcctgctaattgattacacttagatttgctttcgtataacttctcataattagatttggttgctggtatgttagagttaggaaactgaggccaagttgtaaatgtctttaacccccagactgcttttggaacttgtgacagggctcttctaacttaacccatcctgacctggtcttgaccttagcattactaataaggtacttacctcatcatttcgtttctcacttactgaacgtgactataaatcctcctgttactcaagatcttggttttccacacttttgcaaaccttcttttgtagttccctgggagcccagttgaaggggagtaaatctttaattctgataaggccctggagccacagacttctgtgtagccacatctagacaactgaatttcacttacacttccaacttctcatttaaagctacaatgaccacaactactgcaatgactgttactgctactactactgctattacaggttgaccatcccaaatccaaacatctgaaatctgggatgctccaaaattcaaaacttttttgagtgagtgccaatattacactctaaggcaatgttcattggaggattttcgatcttcagattagggattctcaaccagtaagtatataatgcaaatattctaagatctgaaaaaattcaaaattcaaagcactcctggtcccaagcatttcggataggggataatcaacctataccactacctcctcctcctgttttttcctactttttttttttttaacctgttaaggtcttccgcaaattcctgcattgcttctaatctaaacatctctttcattcaacgttttcttttttttttgagatagggtttcactctgtcacccagactggggtacgtggcacaatcatgactcactgcagcctcaacctccctggctcaagtgatccttccagttcagtctcccatgtagctgatactgactagcacgcccagcaaatttttaaatttttggcagaaacaagttctcgccattttacccagactggtcttgaattcctgggctcaagtgagcctcctgccttggccccgcaaagtgctgggattacaagcatgagccactgcacctggccaacatctatattttgaatgactgttgtatgccaggtgctcttggcaaggtctctggatacagtgttgatgagatagaccacaggcttttcatgccaatactcctcctgcaaacgtgaatgttcctaaaatgcaccagacttactataagaagtatggcaagcaccagctccacatagtgacacagtaccggaagggcaaggattctctgtgtgcccagggaaagtggttttatgataggaaggacagtggcttatagtagtgtgtctggagttggttccttcggtgggttcatggtctcgctgacttcaagaccgtggaccttggcagtgagtggtacagctcttaaagatggcacggacccaaagagtgagcagtagcaaggtttattgtgaagagcaaaagaacaaagctttcacagcgtggaaggggacccaagcaggttgctgctgctggctggggtggccagcttttattcccttatttgtcccctcccatgttctgtttttgtcctatcagagtgcccttttttcaatcctccctgcccttagctacttttaggatcctagtgattggtgtgttttacagagcaatgattggtgcattttacagagtgctgattggtgcattttacaatcctcttgctagctacagagcgctgattggtgcattttataatcctcttgtaagacagaaaagttctccaagtccccactcgacccaggaagtccagatggcttcacctctcagtaggcagactgagcctatttttctagaaaagggttaaaactaggaagaaaatagtgctaaggcttgaacatgttgagcccaacctcagatctaagagaatgctggtagaggaggtaagaagagaagaaagggccaaatgatccagttctaagtttcaatctttttattattaatattattgtaaagataataaagtcttaaggttaacttctaaaaaaaaaaataccccaatactgcagattcctggtcattctccttcctcaaaggacccttttagtttggtgagtatacttctctccacaaatcagtgaaagatgtgcttaccccaactggggcaaaggatctaaaacagcctcctggagatttatttttctgtaagggaatcccttattgttaaactgttatttttgtactgcctgaactgggatataatgccttttctacttccttcttttgaaagaaattttctatcatcctatactaacttacagtttttcttgtcctcctgagcttgctgcagctcaaaagaaccttcataatttactcccctgtctgtcagtagaagctggaactccctttctcttcccatagcttctgtaaataagagaagtggccttttcctgcctgtctcccattacctcactttagaagtctcttctggtggtaatctcaccttttatgagagtgttttcaactattgtaactaacttgttgttcccataatacaatgttgtaggacagtgctaatccgacttgtccttcagtgtggtaattatgggccaagtaaagtaaaatgttagttgctaagtctccagtggggtactccaccaccagttctactggactttgagaatatcattcctgcctttcttcttggttcacgtctaggcaagattacctctttttctctgttttcttactattttaataattgtttttactatgaatatcagagggaaagagatgactttgcccttaaaagatgctagccacataatctctgcaacctcaccaaacccccagtgtaaggtagcatctcctatttaatttggaattcataagagaagttagcttgttacttttaaatggactacagtttctttatcatctgctttaccataatccaaaaatttcagaaccccagaggaaggtccttaagattaattatctctaccattgtatgccgttagaatccttgtatcatgtatcattttttttcttgttttttcgtttgtttggctaaactttgctgtttacctcattatcaacttttatatcagaactcaacagcagtcatattaggattctttagtaacacagcgatgtgtgcacttttatcttcccatttgggggtgaaatctgccactgttttccaaacgaattaacaaccaaccaacaaccacacacaaaaaaggaataattcatgttctgacactagccagcttaaaagtctcattgttttggtatcctttcactgttgctaaagaaattaagaggatggagaaaacaacaatccattggtttagtgaagggaagcaaggttgagggagtaaatgtgatgttcatccccccactgccactttgttctcctgaaggacctttcctttagatatttgtcgcactgccttccttcagtttgttttcttttcccttgttttgttttgaaccaatgtgtcctttgaggaaggaaggaagggagggaaggaagaaggaaaggaggagagaagaaaactcatgtaatacagccaagattgtgaactgagagttggggcaaatgcaatatttggtgatgcaactatttctaaacctttgtgtgctggaccagccttgacacagtcaccgttttttggaacaactcggagggattttctttgcaaaaattctgtgatttcagttttcatagttccaggactaaattgccagcacaagcaattttttttttttttttgagacagggtctccctctgttgcccaggctggagtgcagtggggggatcatggctcactgcagcctagacctcttgggctcaagcagttctcccaactcagccaccccagtggctgggaccacagtgtgcaccaccacacctgactaatttttttactttttatttttttctatagatgagatctctctacattgcccaggctggtctcaaactcctgagcttaagcgaccctccccacatgggtctcctgaagtactgggattacaggcatgagccaccgcgcccagcctcagagggattttgttcttgagaactaaaacgtgacttctgttaatcatcagaatatttatttaatgtgtttaatgtaaaaaaggaattacatttattgtaaatgaaggcactaaatatatttttactcttaaattacaatgttgaagtatccttttgatcaaatgcaactggttttttttttttggtggggggtgtttggcttgcaaaagataaatcatttcagaaatgtttttctatttgcattttttcttgaaattttcttttgagtatggaaaagtgatcaacaaacaatacagagaatttttaatgagacatgtcaggcatcgtggaaggctcttgcctgggtcacttatgtgatgacctcaacaaacccattttattatacaatgaaaaaagtgtacgaagcttacatatgatttttttttaagtttcttcctgccagagcatggattaaagaaactttagtaaagagtaaaaaattttaaaacacacagtttgatatgaattttggtaaaagttatcagagacaaatactagtgggccaacgaaaacactgtatttataggaaaatttgaattggggcaataaatatgtcctgaggctttggtggcatcaaagtattggtgctttattttttgtgatttattgttttatcaacagaagtgagcacttgtgttcagaaaaggataattcacacttaaatcttgtttttatttaatcaagcttaaataacaggttagagtggtagcaaaaaaaaaaaaaaaaagtctaatatttagtttgaatcttaaattggtcacccagagctgctctctctaggagcgaacctctctatttgtcaataaacaagagagagatacaggctcccagataacaggcatttggtaaactggcgacagtcatacaagcgagaatgttaaaatgacttcagctctttctagcttcattatgtcagcctggcagatcacatatggcattatggaaatcagcaaatgaaaaccatattgatcagcattgagaacaaatgtaaaaaaggtggtctcagggaggagcagagaagaagaatgctttcctgttcaacctgataggcccttgttaaggccttttaatcatttattaacataaccctccttcttccctctccactcagattacctcagccacagagcatcctgctccatttatcttttaatgcttcctttatttaatttatttttaagctctaagttatactcttatttcagaattgagttttacttttcatggtattgtttaaagtgacttaaatgacttttcccaacaagctcaccaggcattcaaaggaagaaaagcatttgctgagattcacctatcagcaaataatttactcggtatgcaccacaaacaaacgcagagagacagagaaagacagtcagccagacacattaaaaaaaaaaaaaagaaaagtaaaatctgagttgttactaagcctaattctctggttaaagtttgggtcaatgtattcattttggtcttcttttcagggattggaattgagcctggtaaaattccttaggtctaaaactggaatctcaggcaccttctctttccctcttcattttctgagttcgggagaaaggtggacttttgttttatcttgtttcttttgggggaaacttagagtaatatttggtctgccaaaatgagatagagaaatggaaatacgtgctttgtggaggatcctgttttccttgagtgtccttacctgaaatggtctctttggttttgtaggttcagactgaggttggaacgggcttgcttctctctctcaccttctccctacccaacccctgcctccccttttatttttatgtcgagtttcatcatttggtaagaaatttcagagggatttttaaatatgaaactgtgtctttttgtagttgatgagtaacctgtggatgtgaatccttggaatcctaattggcacataacaataattgtttctatcctgctataaaccataagtaactcctaaaaaaattcacatgcacacaaaaaatctgcagtgtggatataagttaatgccctgaagctggtacatacagaccacctcaacgatggactcctttatgaatgatttaggtaattgacacaatttaatatttgcaattatttttcctttgaaacaacacttaaaaaaaacaaattctacaacatttaaacagttgaggcatcactctcctataaatttagtattaaatttcaaaatacgtatttgttttaaaaagcaaatgtggttaatctcgaaatcattgaactttctctttgctctggactccttgtctgaggctgtttgggatggattaattttaacttttctttcctgtttctttgctttcccagtgcatctgggggaaataactctgattgatttggatatcaaaagatgtacaatgtgaagatctaatttatcaaaacagaattcaataattttattcattttggctctcccttgagactccaaagatatattcagtaatatatttgaaaaatccaggtataaaaatgtcttttatcttctcttcatcttgtatactccttgatttctaagtacttttcctcttagactcatattactatcccactttcctttctgggctctacatcaaacagtgtaggaattacagcaggagtgctatctgtggaagacttactccccttgtttgttgcagaagagcagaacattaaacagtgagtggactatgcagaaacgctctccctctccggctcttttctccctccctgcctctttttttttttcattcttgcctctccttctcttcctctgtttctctctttctctctctctctctcttcccccccacccgcccccattcccaatgggagtgttgtttatagagcattataatttataactgaagagagtggatttaatttcagtggagaggctcgccagcagggcgccagcctgcaatcatatgaatcagcaagctgcaaactctattgaatggaaagtattatcgctggccacaaacggacactgtttctcctaaacaactcccttggtgcaggaagaccttgtcttcattcatctattttacatatctacttctgttttaattttgccatttcctaaaagtgttttctgttttagattgcagcttttctctaactaccttatttcctgatgcaatattgaaaactgctattgtatatttctgactgatttgatatctcttctttccttattctttaccatgtatgactagttttctgtttgcttctccttcctatatgcaactcttttttttatgagacctgttaaacctgccaaaagactaaccattagcattaatactgtaaaatgctagtcagtttggatcacctcaagttttatttaatcatggatattttgtttatactccgacattttttctacattcatggaaagatttattttgttgtcttgcaaacatctgggagatgatttcttattctttacatgacccatcaaatgtcttgtaatgttagtacttgtgcctttataccacatttttctcaagtgtttcagtcatttttttaggaaaagggatagaatatgtgcatgacttgtggctggtatttgttttttgctttaactcaaaatcagctgctttaatgtagctgaactaaatctctaggttattctaaaaatcaagttggaccaactttgctgatacctttttaagaagtattttactgaattcatgtagctattataattgttgggaattttggtagtgaatctttaactgaggttagacagattgcattactcttgcatcaaatatcatgctatcttcatccaggcttttaaataatttcaacacctatgccttaacaataaaatcccagttgcacaaatagcgggttaactgataatgatatttgcttaaagggaaagagggatagtacatgagacagtaaggcagctccgataaaggaatttgatttcgatttcattggaaagccagactagtctgactacatttatttaaaataaaggtctttaaagatactaaccgaaatgcaaaaattagcagataacaaaagtgaacttctaataacaaaacttctaatcagaaatttgattagaagttcatgttttgtcagaaatagatcctttttgttatataaaaggaaattatttatacatcagcttgcatattttcttcacacaatttaacatcaacaactcaaaatatatgtaatcataatttttctcatttcaagcacaaacttgtgaatccatatatattcatacattttatcctttaaagtgtgagaatagagttatagtcttcactgtctcagctaggtttttcttttcttttttcctttttgcctttgattactccataagaattacacacagaagcagaaaatcaatatgtttacctctgcttattttcaaaattgaatgttgctgtggtttgataccagagacggtatacccagtatcagctttgagagattttgtttggttttagtttaaaattccttgtgtgtgtggatattacctctgacaacaattaactatcagtaaaagtaaaatgttcattttttttttccccaagaagtagtgagtgaaatgaagaagaaacttgtgagatgatttcaggtgaacatctttctaaatccttttattcatgacttaaaaccatttggtaagtctgacccaagatgtatggatttttattgaattattaagattacaaaaactacaggcagctatcttcacacatatcttcagacagtaatcttgtgcatttttaacatccttgaggaggtgggagaactatgttgaagtgcagacatttgattaaggttggaatgactcaacagtagtgaaaacacccttgccttcatcttttcagaggcctggagaggcagaccctttgtcttttcacttgagtcctgccttctttgtttttgtgttttgttttgtttttgcctaaaagatgttcctctctacctgtaatgtaacattcaagaaaaatctggtttatctgtgcctcatcctgattaattcctattttcaaaatctaccataagaactttcaaaatccagtcctagaacagataagttgtgtttgcctgtgtattctatgcaaaagattagtttctttaaatttatacacacaagttaatacctttgagaattttctgcaattgaagtaaaagaaaaaatatgtggttggcatctttgatttttttttttttgtagtgacagtctcgctggtatctttgatttaaataaaaatatatattgaaaatagaaccatctataaatacatttgtccaaaatctttatatgctactagattcaaagatataaattaactacaaggaaatgccattcactaaaaagttgctttttatcatttaaagcagggtggtttttttttttgcagaatttttgcatgttatggtgacctgacttcctaacatattatctgattccttgatcagaaaaactttataaaaatagtctgagttaattttttttttaatttactggataaccttgtaaaagtccctccactagtcatatagtgaatatgtcacatttaggtaattgccattgccgtgctggatggttaatatacggaatttccgagcactgatctaatagaacttgctggggcatcatggcagacaagtatgtctcccctccctgtgactgcgctcctgcatggtatgcttggcaagcttagcaaagcttaaaagtcagctgcatctgtgtgatccaactttgctttgactgggagcaattgagtacaccatttgttttttctaaatatcacaaaaattgtattttccatttactagggccttttaagaaaaaaatgcctagggctgatggtttaccaacttttttaccatctatgcctccaaaatataaaaaaggtcatggtcttactactgattatagtggaccacactatggtcactctagttaaaactgtgaccttgaagcgggggttgggtaaggaaggccctacttgtggcagctttcctccacattttggagctttgatgtgttcctgcagctgatataaatgcagggagggggtgtcagggagaggcagctggctggcagcgacagattaaaatatttctgacccacaaatgtaaccaaatgcccatatttcttcatttaacataattaatgccttgtatttccactgactttgataaagtggccttcctcttcccatcccatcccccttccctgtgtcaactttgggacgactacaagagatctatagttaaaatactctgcagatgatgaaggatagcatgtctgaaaaaagctaacataaaagtctcaattaggttgctgcctagcaggaagcttataaccacattaaaatggaaaagttatttcatttttagtatactgtatttcagcagcaagagttgcaatctgagagtaatatgaaacattttggtttggctgccaagtacatccacattttgttataaatgtataattacaggaaatatgtgaaaagtgttaaatatttcttatcaaatattgttaaagaggtattctggttacatttggaatttagaaaaggcctgggatggattttgatcatgttacaaggcccacttgttgcatttaatttaaagcagttgtcccaatttcattaccacagagcatagcgttttcaaatttattctttaaaagacagagatagtggcacaaaatgtgctgtgggtttaagcaatatttgattgatcatgtgattctatcagtatcttttttttcttttattttgcctcagtatacacatttctgaatgaaaagatagacgatgtctttattttaaacaatctagtggtggttgaagaggccatctggaaaggtgatgtcaacggagggtagggtggttgctggtggaggggagtagccagcgcccctcccctcagcacacataccagcccccgcaattccagtttcatggtgcctgagttgctgtctggttggttgaactcattctcctcagcttatatttaactcgtcgcttgttctggaaaagtagtagtactgccttctctggcctttataaacatgattgctggacaaagatgagcagcacggatttgctgcgatggtcagaattcaattatattactctctctgaggcaaaaagcacacatttaataactaaattggattccttctactaagagatcctaaattcgtgtttaatagccagctaaatgtagagctgatttatatttataggctggttgtagatttggttgatagaatataaagtttgatctgtatgtggatggttttactaccccaaatgaaatgtacgtatcctggtcctgcaccatgtttttcttcagtaaaaattgaagatattttattgggaaatatcctgggtaagtaaacagtgattgcaatgtgtatggagccacggttcttacaggagtgggtatggttcacataggaagtgggagcctagttaagattccgattctctgtgggatggggataggtagggaatcatttctcaggagaaggagagcttgcgaatggaaggggtgttcctgccagctgggtttctttgcattcccaacagaaggttgtttcatatgcatttgcctctacaagaatattctcacaccatagatatagagaaaggacaggtatatacatcgtattttatttgaaggtatcctgacagaatttctgcctatcttttttcctgctacagtctgttgtacagcagcaagaccaagatgattccagtaataagccttattggtatggttcactgatttttttggactctgcatttattttagcagacttccccaataacattttgcagttttcagcttttagttgttgaaaacaaaaataataagtaaaccagttcagggatatacttctctttctgaaactgattccatgtcataatgccctccttggggaggagcaacgtctccagccgaggctgcaacccgaggaaccactcctgatggaatatgagaaagaaaagtgtattatttacattcttaatgttttgccttttgttgttatttgggacactcaagaggaccaacatgacgttagagctttttacttaataaattatatacatatatatcttgcttaagttttataggtaatcctggaagtttagtcttactttgggaaaagatcaaggcaacattctattcacattcgttcagcaaatatttgttgagcacctattatatgtcataatagtgagtgcctagaatacatttaccagaggaaatgttgttcctactaaatgagtaaaaccctgcggcacacacgataaatattatttttaaaaagtggttttaggccaggcctggtggctcacgcctgtaatcccagcacctggggaggccgaggtgggcagatcacgaggtcaggagatcaagaccatcctggctaacacggtgaaacccagtctctactaaaaatacaaaaaattagccgggcgtggtggtgggcgcctgtagtcccagctactggggaggctgaggcaggagaatggtgtgaacctgggaggcggagcttgcagtgagccgagatcacgccactgcattccagcctgggcgacagagcgagactccgtctcagaaaggaaaaaaaaaaaaaaagtttttttctatgctaaaatttaacagatcaattcttctcaactattaggagatgggatggtttctattctcttaacacctgaatgaccaagatactttagatctgaagtataattacagtatgtttttccagggcagagcttctcagagtctttatttaaaggtttcatttcagagtcctttatggaatgtagattaagaagtagtaatattccatctacccaaaagtcaaacaaacaaattttttaaaaactcaaatagccaggcacggtggctcacgcctgtaatcccagtactttgggaggccaaggtgggcagatcacctgaggttgggagttcgagaccagcttgaccaacatggagaaaccccgtctctactaaaaatacaaaattagccaggcatggtggcgcatgcctgtaatcccagctactcgggagtctgagccaggagaatcgcttgtttctcctctgcctctgggaggcagaggttgcagtgagccgagattgtaccatcgcactccagcctgggcaacaagaacgaaactccatctcaaaaaaaaaaaaccaaaaaaaaaaaacctcaaataaatcaaagatttatttgaaatgaccagatttttgggcactgaaatcagtgataaagacatgactttttttttttttttttttggaaacatcagtactgggaaatttataaagcccttaatagaaagtgataaaaatactatggaatcatgtgtgtagtaattccgaatcaatggcaagatgttgaattatcttctaaatttttaaagaaatactatgttcagggtagttttttattaaacatgtgctatggtttcaatatgtccccaaagttcatgtgttggaaatgtaatctccaatgaaaaggtgttaagaggtgggacctttaagaggtgattaggtctgggcatggtagttcacacctgtaatgccagcaacactttgggtggccaaagcaggaggacatttgaggacaggagttagagaccagcctggacaacatactgagaccccatccctaccaaaaaaaagtaaactaggtcatgagggttccacccccatgaatgaattaatgctgttatcgcaggagtaggttagttattgcaggagtgggctggttatcgcagagtgagattctgactaaagggtgagttcagcccaatttgcttgctctgtcacatgcttgcttctgccttccatcttccaccatagaatgaccctcaccagagcctggtgtcatgcgcttggacttcccagcctccaaaactgagccaaataaacctttgttctttataaattacccagtctgtggtattgttatagcagcagaaaatgaactaagatagcattcttcataatcttctagttccttatgagttagtatccacaaatgatggataagatacctgttcattcataagcatgttctgtgtactccagcatggtattcatttcccgattggaccactttcctggtccgttatggaaaggtgaacaaacaaacaaaccccacatggacattcagattgaacagtgatgatccttagttggttctccatgcaggtggctgttaaagaagcagagtgcttgacaggcctgcctgggagaaggcaagcagtaacagtttctatccattcaattcttactccttttttatgccctttccttacctaataatttccctaattatctggtatatttcaaaggaagctctgttaggaccaacagcatgtaaattagacacttttctcccaaaaggagccttgggatccaaaggaattagaatgaactcaccaaagaagccagatcctttcctaaaagggtacttaaccttagtgcccaccaatgtatatcctggccacatatattttcagtagtattatgcactctgaggacatttacattcttttttaaaagttattctacttttttttaaaaaagttttaggctgggcgcagtggctcacgcctataatcccagcactttgggaggctgaggcgagtgcattacctgaggttggtagcctgaccaacatggagaaaccccatctctactaaaaatacaaaattagccaggcatggtgtcacatgcctgtaatcccagctactcgggaggctgaggcaggagaattgcttcaacctgggaggcagaggttgcagtgagccaagattgcaccattgcactccagtctgggtaacaagagtgaaactctgtctcagaaaaacaaacaaacaaacaaaaaacttttaaaaactattttttaaaaaaatactaaaaaagttatcctactattttttcaaaagttattctctatttttaaaaagttataatttctagcggactcttcacttacattacctggattaatacttgaaagaactcaaagaggcaggaattactattttatattttatagatgagtaaatggaggcttagagatgttaggttatttcagcatagttactaagtgatagagctggaagtcaaactgaggttttgtaaatctaaattttgtctttccaccaagtgacactacataattcttatgatggtaaggacatagctaaagtaggtaattgctgcttcagcttcttgatgaatgaaggaaactgaatctcataagtttttccctttttccccataattgctagtttagtctttgcaaaacaaagcacctctcccaggattccttttggcagattatcatcaagcaaaatcctcgaattccctcatggcatattttttgtcctataaagtatcttatttaactgtagcttcatcacggtcttccctccaaactacttactagttaaaaggcacttcgtatcaggcccttctaatagcaaatagctccataaagcatttccttttttttctttttctaaacgttttattattattgttactctctctctctctctcttttttttttttttttttttttttgagacagagtcttgctctgtttcccaggctgaaatgcagtggtgtgagctcagctcactgcaacctgcgtctcctgggttcaggcagttctcttgcctctgcctcccaagtagctgggattacagccatgcaccaccatacctggctgatttttgtgtttttagtggacacggggtttcaccatgctggccaggctggtctcgaactcctgacctcaagtgatccgcctgccttgccctctcaaagtgctgagattacaggcatgagccactgcacccatcctgaactttttattattttttagtttttatttttagagacatcatctcactccgtcgcacaggctggagtgtagtggcacaatcatagatcactgtggccttcaattccctggggtagagtcatcctcccacttcagcctcctgattagttgggactacaggcatgtgccaccatgactggctaattttgttgttgttgttgttgtagagatggagtctcactactcactactccatctctacaacaatgtggagacccaggctggtctccaactcctgggctcaagcgatcctcccaccttggccttccaaagtgctgggattacaggcaggagctaccacgcccagccgagcacttccttaaagaatctatttattttgtgaaataggtaaatatttattgaatgcttattgtgtttttagcagtgtgggaggtgagaaaacttttcctttcctaattcaaggagccttagttaggaaagatgaggcataagtgcatttcaattacttaaaagatgaagaaataccacaaggcactatatgagtaattgcaaaattaatggcacagagagtaaatgcttatcgtaatattagaattgtaacactgataaagtccttatctagtcccacttccttaaaagaagataaaactcagaaagattagcaatacaggcttaaaattatacagcaagatattgccaggtctagaattcaaattcacatcttttgactaccagtctctcacctgaactaactctctccttgaactgtagatacttagatttttgagagggaaataaaatctcactatagatagttttaagcttctgacacaatctagcagatgtctgtgaaactgtgtgctataccctggacattaggcactaggtactagaaaagatggtcccctgactcaagtagtttacagtgtaatagggtagacctctaaaaaactggactacaaggtaaacttaaggaaatgacacagaagagctttacgtacatatgctgtgggagcccagacattggaggagaaaccctgtttatcaggactggggcttcttgtaggggatacctttgaacagatggcattgtttggaaggacatttcatacaaaggaaagggctgtgacttgcattttgtttgttagtgctttgatgattcgtagctattttctttttctagtctcatttttgttccccatgcctacttttcatcgtcttagccacctgtacacatgcctcagtgctaaaacctacatttcgatatttgctgtaactataggtttacttctctcctctttggtatcatacggcgctgcctgcctcctgatggtagacatcattttatttctccattggcttttatcactcattggaaacaaaggaaatttatgcccactgacaaaattaagcattggcttatttcatttgctgggtcaggtttgacttttcttttttcccatctgtctccttctgtatgtttttgatttctctaactctagactttttttctacccttccacaatttcccctctgttaactcccacactctggaagatctttttgatgactctttgatccaactctgtatttatatctatcatgcggacctctctcgttccttgagccttttctatttctcccttctcctatattttgtatttggcattgaattaccatcctgcaaaatgggctgactccattttgtgtaaaaaataaatgcaatcaaatgaaagctaatttatttttaacagggactttgaatgcctggagattaggtcataattttctcaccttttcaaatatttatctctaattttccctcctgccaaagtctagaattccagagtgtttttccctagtaatttaattaggccacaagtttgaggcttaatggtagatcaaaaaatgtatgatatgcttgagagatcaagacagcaaattgattactgttgtagcaaaggttggcaaatgtgggagaaggagcaggttctgccctgtgctgcaagatctgagtcagcgatcaaggtcagtctcagttcattaacttcttctgaaggcttatagtcattgcaaatataactgcttataccttatgttatcattatatagtacggttttggaatgacttatgttcacctcaaatgtgtcctagagtaacagaaggatgctgaaatgtctagagtagtataaactgatttctgaccattttgcctagtttcctaatgcccacaaatggaaaagtctcacctctcaaggtataagtgtggataaatactctcacatgtgctgagatcagacaggggcctgcttttaaatgaatcatccaaaaatcattatttattttgaggagcaatatacaaggattctcactgtacttccagccaatacattatttaacattagaatatatttcatattattaaggtctcaccattaagaaagatgttttctcaacagttctaatacctatgtcattcttatgttcagacaataccaaaactctttttaactgtaaattgctacccttaagcccacttttaaatgatgtttaatatattccacttgaaacaaaatggcaaatcatattaagcttaacagtttttgagaagtctggaatgaaggtaacattttatgtgcccagtcctttacatagaagtagaataacttggtttgagatttttgtatgtggataacctagctgtgcaatgagataggattctttttccttttctttccttgttatttaaaaaaaattgagatggggttttgctatgttgaccaggctggtctcaaactcctggccttatgcaatcctcccatcttggcctcccaaagtgctaggattacatgtgtgagcccggccgagatagaattgtttcatttaaggattcctcagtgtactttagaagcactccacaccaacctttataaataaacagaaagtcagaaaaattgttatactttttcatttgttaaacatattttaaagaccatttgattttcagacagtggtggtggtgataagataatgtattgaggttgtttttaagccaagaatatctgtggatatgggaccatttttacttatctcatgtaaaatagattttgatccaatttctgtgagttgatttttctgaaaatgaaataattaacattattttcttttcttttgagacagagtcttgcactgtcgcccaggctgtagtgcagtgatgcgatcttggctcactgcaacttccacctcccgggttcaagcaattcttgtgcctcagcctcccgagtagctgggattacagatggatgccacctcgcctggctgatttttgtattttgagtagagacggggtttcaccacgttggccaggctggtctcgaactcctgacctcaggtgatctgccacctaagcctcccaaactgctgtgattagaggtgtgagtcaccgcgcccggctaacatttactttctaatcagttgggtattccacacatcgaattacacaaggccttcaataaatgcaggcaccagacttacccttctgcttgaaacaaactgaacaatgatatgatgtaatggttttttgtttttgtttttgttttttggttttttttgagacggagtctcgctctgtcgcccaggctggagtgcagtggtgcgaccttggctcactgcaagctccacctcgagggttcacaccattctcctgcctcagcctcccaagtggctgggactacgggtgcccaccaccacgcccggctaattttttgtagttttagtagagatgaggtttcaccgtgttagccaggatggtcttgatctcctgacctcatgatctgcctgccttggcctcccaaagtgctgggattacaggcgtgagccaccgcgcctggccgatacgatgtaatggttttcaaggtattgggtaacaggcagttaaggatagttatccctgaaagatgggaaataaatgaagtgagccctgcaattgtcagagctcgtcgctggtacatattgaaggaaggggaaatccaggtggagtgcagcagtcttcatgagtggaggagatagaggtgggaggttgaggaggccaaggtggctagaactcacagggcagagtccccgagaggaaagagctgtacacggagagagaacattctagagatctacagaggacatcctgcaagccttcagctgagcacatgggaaactacccaaggcccaggaaagagccacttaaaaagatcagagggaacattcgctggagcttatgcagggctgggagtgatttctgttcccattagccagattggaaaatctcataatttgcaggtaaagtgatacaagatttttgtgtcaaaagtggggcaaaatttcctctaaattcctgtagccttccttgcttaaaaaaaagcaagacccacggcacctcctaattaagtcgcttataatcagtgataaagagaaaaatgttgtaaggttcttacactgtacatgaagtgatataatacatcctaaatgtgtagacttggataagttacaaatatatgctatacattctaaagcagcctctaaagtaacataggtgtagctaatcagttaacaaatgagataaaaatggcatcctaaaaatattcagtagatccaaaacaacacatgggaaccaaaaagaaaaaaatggaacaaagaataaatgtatgaactaatagaaaacatttagcaagatggtagatttaaacttggccatatcaaaagtcatattgaatgtaaatggtctaaacactcaattaaaagacaggaaatgtaagattggataaaaaaggcaagaatcacctacatcttgcccataaaaatctcacctaaatataaagacatgaataggacaaaagtaaaaggatagaaataatgatatattatgctaatactaattttattttattttttttttgaaacagcgtctgttgccaaggctgatatgcagtgacatgattacagctcactgcagcctcaaactcctgggctcaagtcatcctcctgcttcagcctcctgagtagctgggatttcaggcatgtgccaccatgccctgctaattaaaaaaaaatttttttttttttttgtagaaatggagtctcactgtgttgttcgggctgttcttgaacttctggaattaagtgattctctcaccttggccttccaaagtgttacgattaccagtgtgagccaccatacccagcaaacaggaagctttaaaaagcaggaatggctatattaatagacaaagtagacttcagaacaaagaatattatcacagaataaggaaacatttcataattacaaaggggtcagttcgtgaagagaacatatcagttctgaatgtttgcctcattacagagcttcaaaacacatgaaacaaaactgatagaactacatgtagaattgggtgaacacacaattatagttggagattcaacatctctttctcagtcctcaatagaatagacaaagaatcagcaagaaggagatagaatatttagaataacactaatcaccaacttaatctagttgacatttactgaaaaacaaaaaacactaccaacggcagaaccaccttctttccaagtgcacacaaactatttactataataattcatattctggccgggcgtggtggcttacgcctaatcccagcactttgggaggccgaggcgggcggatcacgaggtccagagatcgagaccatcctggctaacacggtgaaaccccgtctctactaaaaatacaaaaaaataattagccgggcttagtggctggcgcctgtagtcctagctactcgggaggctgaggagggagaagggcgtgaacccaggaggcagagcttgcagtgagctgagatcgcaccactgcactccagcctgggcgacagagcgagactccgtctcaaaaaataataatgaaaataattcatattctgagtcctaaagcaagcctcaataaatctaaaggattggctgggcgcggtggctcatgcctttaatcccagcactttgggaggccaaggcgggcggatcacgaggtccggagatcgagacaatcctggctaacacggtgaaacccatctctactaaaaatacaaaaagaaaattagccgggcgtggcggtgggcacctgtagtcccagctacttgggaagctgaggcaggagcatggcgtgaacccgggaggcggagcttgcagtgagctgagatgacgccactgcactccagcctgggcgacagagcaagattccatctcaaataaataaataaataaataggatttaagtcatacaaagtgtcttctgaccacaatggaattaaattagaaatcagtagccttaagggatttggaaaaatcaccaaatatttggaacctagcacatctaaataactcatggatttaagaaataaaaaggaaaattagaaattgttttgaggctgggcacggtggctcatgcctgttattcctagcactttgggaggccaaggcgggaggatcagttgaagccaggagttgacaccagcctggccaacactgaaatcccatctctactaaaaatagaaaaaattagccaggcatggtggtgcacacctgtagtcccagctgcttgggaggctgaggcatgagaatcatttgaacccgagaggcagaggttgcagtgaactgagatcacgccactgcaccccagcctgggtgacaaagcaagactctgtctccaaaaaaaaaaaaattgttttgaactaaatgaaaattaaaacatatcaaaatttgtgagacacgctaaaacagtacttagagggaaatttataacacaaaatgcctatattagaaaagaaaaaaaggtctcaaatcagtggcctcacctctcatcttaaaaaaactatataatatggcccagtgctttgggagactgaggctgaaggatcactagaggccaggagtttgagaccagcttgggcaacataggaagacctcacctctataaaacaattttagaaaattagttgggcatggtggtgcaggtgtgtagtcctagccactcaggaggttgagatgggggatgacttgagcccagtggttggaggtcacagtgagctatgatcatgccactgcactccagcctaggtgacagagtgagaccctgtctcaaacaaacaaacccaaaaacgataatacagatcaaagtggaaattatttaaataaaaacagaaaaacaaaccttagttcttcattttaacaccaatactataatccatttttaaaaatggaaattgcacatcatcaaaatcaagaaagtcagttcctctaatgatactattaatggattgccacacactggaagaaaattgtttaatatttttaaatttacaaataaaaattgtatatatttgtgatgtacaacatgattgtttttgtgtgtggtaagaacacttgaaatttactttcagcaattttgaaatgtacagtatattaactgtatgaacagcaaattattaactgtagtcaccattctgtcaaacagatctcaagagacttactcctccttactaaaactttgtgccgtttgacctacatctcaccattttcctcaccccagctgctgataaccaccgttctactattctctgcttctgtgaacttgattgtttatcaaatctgcacataattgagatcataggtcatttgtccttacatgcctggttcatttcacttagcataatgtcctccaagctcatccatgttgtcacaaatgacaggatttccttcttttttaaggctgaatagtattccattgtgcatatgtaccacattttcatttatctgttgatggacattttggttgattccataacttggctgctgtgactagttctgtaatgaacatgagagcacagatatctcttcaacacactaatttcctttcctttctgtatatacccagtttcaggattgctcatggtttgtatggttaaaataaggaaatggccaaagtatgatttcaataatcgcacggtgtattaccatacaaagagattctcttccctgcttccctacaatgctcaaacggggagaaaatgagaaaaaatcttgtagggaatacactcgatagacacagtgagttccattttatttagagtccaattgatgaattctggtagctcaattaagatagaatcaggcctcagtggaagtaaagtctaatcacagttcgatatgtacttttctatgggagcttctcaggagagatggtttgaccacacaagtccttgtacactagtgagtggtgcaggtattggcaggtgagactttggagaacagcttgaaggctgacaaagagtagtcctgctgcatcctgaggtctcagtgtgtcttgtcaaagtcctggggttaggtcaggcatgggtggttcacacctgtaatcccagcactttcggaggccaaggcaggaagattacttgttggcaggagttcgagatcaacctgagcaacttagtgagaccccatctctgtaaaaaatataaagattagctgggtgtggtggtgcatggccatagtcccagctactcaggagactgaggcaggaggatcacttgagtttgaggatgcagtgagctatgattgtgtcactgtgctccagcctgggtgacacagtgggaaaaaaaaaaaaagctcttgggtttacatgtgttttggagtccagtagttgagatcagtaactcacatatgtggtctgataaggggtgatgtaacattgtcatggggaagggcattatactccatgtttttatcttagcaaaacatatgtcaccaatgcagcaaattatgtgaatgtttggaatcatttcaaagctgtcccagctagattatatgatagctctatttttaattttgggggaaacctcaatactgttttccataatggctgtgctaattcacattcccaccaacaatacactgtggttcactgggagaaaatattaacggaagctacacattggtagaaagtattttccgctcacccaactgataaaggacttgtatccagaatatataaatataaaaagctcagaactcaagaataagaaagctaacaactgaattaaaaaataggtaagtttgagactaggtgtggtggctcacgcctgtaattctagcactttgggagactgaggcagaagggttgcttgagtctaggagttagaatccagcctgggcaacagagtgagatcccagctctacaaaaaataacagaagattagctgggtgtggcagtatgtgccttgtagtcccagctactccggaggctgaggtgggaggattgcttaagcctaggaggggaaggctgcagtgagccatgattgtgcccctgcactccagcctgggagacagagcaagaccctatctcaaaaaaaaaaaaaaaaaaaaaaagaaaaagaaaaagaaaaaatttggacaaatttaaaatgtagagaaaatattttcctttaaactgtcaaccttatttataaggtaagatgtatatggttatttaatatattatatatgtatttaatatatggctaatatatacatttttctgactttatatatagatataaaaccagaaaagctatttacccagaaaatttttttcttcctatatttttgttttcattttactcagtgatataatttttattcttacttcctgatagtaaaagaaaaaatgaacccaaccctcaaaaggctgaggccctgtccccccattgtcagtgatttgttttttctgacaggttgaaaattgtgtaatgtctatttatttatttatttatttatttatttatttatttatttatgtatttagagagatggtcttgctgtgtcacccaggctggagtgcactggtgctatcatggttcactgcagcctccacctcctaggctcaagtgatcctcccacctcagcctcccaagtagctgggactacagtcatgtgccaacatgtcccaacaatttttgaaattttttgtagagacagggtcccactgtatagtgcccaggcaggtcttgaactcctgggctccagtgatcctcctgcctcagcctcccaaagtgccaggattataggcatgagccaccgcactctggcctcaatcttttatttttaaaaatgagcaaatgatttgaacagatttcaccaaagaagatctatagatggcaaagaagcatatgcaaaaatgtttaataccgttagtccttagagatttgcaaattaaaacaaaaatgagatcccactacctgcttattagatatcccaaaatttaaaatgctgatcatacctagtcttggggaaggacatagagcaactggagctcttgtacattgcttttggaaatagaaaattgtacaaatgttttggaaaactccttgctagtttcttaaaacattaaacatgcacttatcatatgatctagccattccattcctaaatatttaaccaagagaaatgaaggcatttgtccatataagaaccgtacatgaaagtttagtatcagctatatacacttgtagtagtcaagaaatggaaataacccaatgtcccttaacaggtaaatggagaaacgaattggtatttatctataaaatggaatactactcagcaataaataggaatgagttcttgataaatgcgataatatgggtggatctcaaataagcaaaaggagccagaacaaatgaatacatactgtacggcttcatttttataatgtgctagaggatgctaactaatctgtggtaactgaaagcaagaagtggtttcctggatatccaaatggggcaggaagagagatggattacaaaggggcatgatttaacctttggcagtgatcactacactatgttcattatcttgattgtggtgatgatttcatgggtgtatacatatgttaaaacttgtaaatggtgcactttagatatgtctaacttagtgtatgcaattaaactatcaaaatatattctcaaggatggaagtttataccctcattctatattctgttcagcagtgctattttgagattatgtataccaattaatttagtaggtcttttaagtggaagttacatagtgtctatctgttgcacctgacttgtttccaaacccatcattatttaatgagagagctaaattcatggcattttgattttggactaaacattgaatatgtacattacataagactatatactatagctactaaatgggtaatcttttgtcctacatctctacattctatcataaaaaaattagacacttgtatctttgaatgtttgagttggtgttttgcttcagactcttcaaatacagactttaatcccaatctctttctttattttaaattaaaattcacaggttctggttgggtgggctgtatacattcaatctgccctcttattccatggacgtcctgcttggacattatattttgaaatctgtattacaaagtcttttatccttttattagtttagtactttaaaccttagacataaaaaagaagactatcagtgaaaatcaattgaaatgtagttagataaagatctgatgtacaagcagaaggcttagttgcagcacaatataatcaattaggactctccagctgcatacagagttttacccatccaatcacttttcacacgtttcttccattagcttgactagagttattcttctttttttaatgtgaattatgatgaatgagattgttgttatgaatatagagatgggtcattatcctacagaaaccagattgtgctggtgtttagtgattagggctatctgcttctgctatcaataaagtacagatttatctgtctcaaattatgattgggaagccagtagtcattgttatctaattcatttaacaatgttacaatacaaatgtataatataaaattgtttttgttcagctgggtaattgacataacttttaagttgtgagggtaaaggaatataatttatcaaatagaggtgggaaatttttcatggcttaaaatcaaataaatattcctcaggaattagtacccccaaatttaacaccctgggtgtagcctttaagatgtcaaaatgtggaaagaacaaatgaagtttacgtaccctatatgaagacgctggagctttgcaaagtaatgagcatcggtttattacagaagttctgtaattaattattacagtctaaaaaatgatacgatgttttcctgggcttgggttgaggaattcaggaggtgggaaggagttattggatctagtttaatgcaccaagtgactggaaatggcattgctaggtaaattgggccgtcagcctaacattagcattttttattaaaaaaaaatactcaatccttagaaaacttacacccaggtagattagtagagaaggtcttgctagaaacagctatttaattttaatcaaacttgtttttctttgcccttaaaattgaatttttgtttttgttcttattttaagtttttcctattccagactcctattgtcaaagaaaaagcctttttttttttttttttaatctacaatacagtacctttcaatacttggccctcacagatgtcagtgcatggatagaaaaatttcattgtctgcagtcatggataattttagcgtcatgtggaaaagtaagaactgttgcctgactatattggacaccaaagaaagccccagtagacaggctattcttggagcttgcaggcctgcctttgaggcccattgatgaaaagacctttgtgttttgtgccatgaggtgggggaggagtagtgttcagtactagaagagttaataaacaccaagagctgtgctcatcttgtagctttactaaggcttaatctgtaagcttgattacctcctaaccctctatctcttgcctctcccttcaagcactgcaggggctttatggtggtattagtggcattttgcccaacattggctttagggaaatcattctataagaaagaaaagcagaaagaccgaatctgtctgctgtgtgtggtcattaacacaaggataaccttatgaactccagagagaggaggggatgtctgtccttactagaaaactactggtaaaatatcactgtttttctctctctctctcttttttttttttttttttggcagcccaatttgttataggcctagtggcatcatctagaagcactcacttgagacactttcagcaggatattcagtcgtttataatggagagtcctttgtattctctgagctgtttcataaaaatatatctgcaagctgtagcgacctgggactttttgttagagacacatacacagagtttctatgtaattaattcctggtattgagatattttggagtccgagaccagattgagtgcaccattttgccaaacatcattaagtcattagtgtaagggacttgttatgaaggaccgattaaaagctcagagaagctgtcgtacatttttatattaatcccaagagctttctaatattcttttctcattctaatgagaagtctcagataatgatgtattatttcacttaaaaaaatcttggaagataaaccaagacaggaaaatgattatggccacagataagagattaaactattcagccaacaagctgtaataaataaactctaagccaatgtactgttaaactgggagccactgggtagaaataatttggctaaaattctggcccagtgttgtcagaggatatgaaagaaataatgaaaattctcccttgcctcagggtaagtagtagactgcacatccagacttgaccgtcaggtcacctgaaggacaggttccctacaaatatgaggaaacaactcagaggacccaatagcaaatgaggcacttagatagcatgtgatggcagaagcttgctacctgtctgaggagcatcagtcccatgcttcgtgtctgcacagtggaacataaagcagcagcttagatggcatatggcactatctgcagtaggctttgtgctgtaggcacagaataaagttatcctagccatgtagcacttgaaatgagggggaaataagacaaccatgtagagcctgagaatagaatataagcttcatgaggacagggtcttatcttttgtcattgcatccctagttagaatagtccctgatggattatagcagtttgatttaaaaaggatctaaggtcaggcacgatggctcacacctgtaatcttagcactttgggaggctggggtggggggatcacttgagcccaagagttcgagaccagcctgggcaacaaagtgagaacctgtctctgcaaaaaattaaaataaaaaaaaattagcccagaatggtggcacacgcctgtagtctcagctactcaggagctgggaggatcacttgaccctaggaactcgaggctgcattgagctgtaatagcaccactgcactccatcctgggcaaaagagcaaacaaacagtttaattaattaattggtatgactggtgaggaacaagatgattcgttccttgcctaagcccatgcttacatgctaaggcctgaaactgtgaagacctactggtagtggttaaatgtaggattttaatcagatcagagcaaagtatggagttgccatgaaataattctgatagccactcagagaactgagaagtgatttattgctggaggtgatattatctttgaacctttgcttgaccatttatggaccaatacacccagaaacagtcttttgtgtagtaacccagccaaagagcttgactattttaatcatttccctttgatagtctggtcatttcttttgtcttttgaagaaaatatccactaattggtgtttctttctgagttgccaaatgctgagaaagcagacagtaattgatgtagtgaagatattttgcttctgttactctgatcatctacatatagagatacactggatgataagagtcaactctaaaatcaaaataaatagaagctccaccatgatttttttcattgtctgctgtaactaagtttgcctttattcttgagttgaagtacatgatatgacagcagaggttggaaactttttagttgcttaatattttatttctaataccaaaagtcttgctttttccttctttttttttttaatcttgagacacggtctcactccgctgcccaggctggagtgcagcgtcatgattctagctcattgcaccctcaacctcttgggctcaagggatcttcccacctcagcctgccttgtagctgggactacaggtgtgcaccactacacctggctaattttttaaaatttttgttgagatgaggtcctactgttttgccctgttggtctcaaactcctggcctcaagtgatcctcccactttggcttctcaaggtgctaggattgtaggcatgagccaccatatgtggccattgctttatgcttgagattaaaaatgctgtctcatagtatccagatattctaaattttgtgaaagcatcccaccatttttgagaggcatctaaaccatttttagctagttgtttattaacggtagtggaagagtgtggactatgagtttgtgataacggttttttttaacttcttattttgaaaaattttaaacataggcagaaggagaaagaatagcttaaaaaaaccccactagccatcacccatcttcaataattatcaataaataaccaagcttgtcttatccttatctccctaatcctactctttgctggttatttttattttaacagccttatttaggtataatttacatacaatacaattcatccatggtaagtatacaatttaatgatttcttagtaaatttacagagttatgcatccaacaccacaacggagttttagaatattcctattaccctgtgttcccatatgctccttaataggagctcacactccccaaccctacgcagtcattgatctaatttctgtctctatgtatttgtcattctggacatgtcatgtaaatggaaacatacaatacgtagtcttttgaggctggcttgctggcctaatgtttttgagactcatccatgttgtcgaatgtagagtgttgtggactatgtcagcactttgttcttgtggccgtgggccccttttcactgagccttctttgcctttatcttcacttgaatttgtgggctatgtgctgaatgacttccctgttactttcagtgttgttttagaggaaaacacagttgttgttttgtctttgttttaatgaactgatatctcctgtgtgtccatgctgattcttaagttgtttaaggaaatatttccttaatagaagaaccttctttcaggatcctcctattcttcctcccaatattgaaaatcattttttaaaatttgccattaaacaaatttttttgtttttcctgaagaaactccccttcatttaaaaatctatagtttcttgcttttagaaaagaaaacattactttaaaatttgccattttgtttgtcagttaccaaattgtccactctgggaaaattcgatgtgaagagctcataagaacaaaagcatgatcttaagtatggtttttagacaaacatgttttgaactccatgttgtctcaaattagaaattttcccttatctccgtagttcaaaatatatttttatttaattatattcaatgtaatatatttttaattaaactatattttaattcatatgatgtctcaagctaagcattgtacaaaggactcataaacatatgtttgttatatttttctacatgatgtttgttaagatgtttaaaatgtcccctaagcatggtgctaaagtgctatgtatctgttgttcctaagctttatttaggtaaatgttatagtgcagtttgctgtgagtttaatgttagtgaatctacaatatggtatgtccagaaaaagaaagagggagttcaccaacctgtacaaagcttcttgggaaaatgctagggtagtacctatagtgcctgattgaaactatggaaaagatagaaaggtggctaaatttgtgaatttatgagaaaatgactgatacaattgttgataggctgaaagccaaagaaatttacattacccagggtcaggaaaatgttatgcccttctcagctagtgctggctggtttgaacatttcaaaaggcaatatgttgtgaagaatattaaactttcaggcaaggtatggtctgcaaatgcagaagaatttttaaagtaccagcttaagtgttacacaggaaaagggttatgtggaaaagccggttttcaacactgttgagactggcttgttttcaattgaggagacattggcaaatgaaccaatgttacatattaataaatgacattttagttgatggaaaatgtcgtgaccagggtcttgcaggaacctaaccctgtttttcccagagaaaatttcagtattcactaattcagtgttcatagtgacttcctaagtaccttgaataatgagaatagattgtcattgataaagtaattgtgtgcaaaatatgtagagaactcttataactcaataatgaggaaaaaaactcaaaaagtgggcatttggacaaacaccacagaagatttttaaatgacaaaaaaaagacatgaagagttgctctgtcattagtcattggggaaatgatactgtgtacaactagaatggctgaaattaaaagactgacaataccaagagctggtgaggatgtgaagaaactgtagaactcttacactgtacattgttttggggaatgcaaaatggtatgtccactttttaaaatagtttggtggtttcttataaagttaaatatacacttgccatctaatctaatcattctattaataggaatttactcaagagaatgaaaatcagtgtttataaaaaaagattgtatgtgaatgttcattgcagcttcattcgcaatagccaaaaactaaaagcaaaccaaatgttcatcaactggcgaagggacagacaaatcatgttacctccctacttagcaataaaaagaaggaagtacgtagcaacacagatgaatttcaaagcattgtgctaagtgaaaaaagacagacataaaagaatatatcatctgtgattctatttatatgaagttctagaaaaagcagaactatagaggtagaatgcagatcagtgatttccaggggccaggagttgggggaaaggaattgactctgaagagggataaggggactttttggagtgatggaaatattctatatcttgattatagtgctgattacatactatatgcattaaaaaaaaaacctttatcagtctcaacacttaaaatgggtgagtttaattaagggtaaattaaagcccttacaaagctggttaaaacaacagtgacagaaactctttaccaaaacctgtaaggctttggttgacttgccagaatcaacttgccaatgcaaaccaagactttgttaccagggacattcaagatagacccttcactgagagattttaagaactcactcaaaataaataataaaattgtacctacttttccaacttaaaaaaaataaaaattttatttgaatgtataagcctctacttcagccaaagctcctgttaggtttgggctatctccatatacagtagtaataattaaaatttttctttcttcaaatggctactagtctaatggtttaaatacttacccatattctactatattgtcttccatgaccataccgtgacctctcaaaacaaaagttagagatcggaagtaaccaactgacaattacagtggttgatacactccagtttaaatagaagggtccttggttaaaatatggttcattcatcggtcaaactgtccttatttcctttaattgaattaagatggacaaatgagagatgtgtgcaagacagaaaaaaaaatcctttcacaaatcactgttatcctctctctgagtgtaaaacgaatcaattaaaagcatgtcaaagcatcttttactgttgaacaactttaatgcagaagtcatttattaaaaaatttgagtgagaaatcggttaccttatacagttaaacatagtttaatgttatctctgagaattgtggattattttatatactcatgtttggctaaaaattataactttgtgctaagaaagccttcatttttcctcttatcctcaagttgaaaatactgactaagaaaatacaaaatataagaaaatacacaattcacacttgtatacacagaatttagtttcatccgtacatttactaaatagttccttaggagagatgtaacattaggatggagggtgaaatataatttttatttttttgcctaatagccaattgctttgaaaaatgtagtccatcttctctttctagtgccttgaattgctatttaacatacgatagcttatttatatattcatacacattctataaaatcatttttaacccgtatgttaaggttgtctttgatatgatagcttatttatatattcatacacattctataaaaccatttttaacccatatgttaaggttgtctttattacagttagttatccatccctatatcttagctgttttcactagtatatacgtataaatgtatactgcttaacgaaaacatttttaacctgtgtgttgattttattacaattatctatccttttatcttagctctgttttcagtggtatacacatgtcaatttatgctgcgtaactcagagcctgcttccactttttcatacttgaatatgttttttcctgctttctaaatatggtcataaatatgctcataacttattttaattgttcatttgaatttttgtcttcatattattttaaattttcaatcggttcaaaattcaaaacataaaaggatacataatgaaaaatcctttctcccttccctgcccccagccacccagtttctctgtttagaggccaccaatattaacagttgttttttttttttgagacggagtctcgctctgtcgcccaggttggagtgcagtggcacgatctcagcttactgcaagctccacctcctgggttcacgccattctcttgcctcagcctcccaagtagctgggagtacaggcacccgccaccatgtccagctaattttttgtatttttaatagagacagggtttcaccgtgttagccaggatggtctcgatctcctgacctcgtgatccacccacctcggcctcccaaagtgctgggattacaagcgtgagccactgcgcccagccaacagtttctttattcttccagaaatgttttatgcagtacacatttgagtaggggaaaaaaatgaagtaacccttatttattcaaaatttcaagagtattaaagtaccattggtttctacatgttatttttattgagtcaacttgccaacacaaaccaacataaaccaagactgtaagtgttatcaaggacatcaagatagacccttcactaagagattttaagaactcactcaaaatactctcagcatgaggcttttagagtttcctatctttggactttatgttgctgacatgtgttctcagctagatttctggtatgtctgtgaaactcctttcttatcattcgtcttttagtcgtggacaaagccagtaaaagagagcatggatatgagttattgagtagcactgatgaccaacagagttacccatgttgcttttcccttagtttatagtctatacttaaaagtttttccttctaaaacacctagagctgagaatgacagttttacccccttaccttcataataaataaatagaattttaaaacacagaacagaaagctagattccagaaaaatgttggcaaccatgtatagggttatttattgatgactttgctcattggcagtataaagggcgtgtcacttgtcattagcagtaacaatttcaccacattatgttctctttttattttctctggtggcaacatgtgtctgaacagggccactggctgtgggtcaagaggtcagtctttgaggttaagagtggatggggtcatttgctattaacctaagattagcagctaaggttttttttttctttctttctttctttcgttttaacagatttcctccatttgtataacatgccaaattaatcttgcccaattttagaagaatttctcctttccaatctgcattttatttgcttagatttatcattaaggtattttttttctattcagatttctttctagcccccatcctagtcctcaaaacaatgttaactttttctaaaatttaaaaatgttcctgtctttaacattcatcttccagtgtacaaatgcagctaatattttctctgctcttgaacttttgagggaaaaacaaatacatggcagaattgtaggatttcagggatgtcttcacccctaaaacaatctctccttgctattctcgctattgaacagtctccaactcttaaactagcaagttttgttgttgtttaactttaaggatctattgagttggtaccctgatacctgaaacctcctacttctcttttctcttcagccaaaagtattacctattatgatgtagtttcatcagtcatctttgaaatgtaaagagagtgcttgtataataagaagtgtgttctccatggaatttttcaacaagagagttcccactcgattcctagtttatattctggtatggaccacaagtctgggaggcaagtggattttaggtgttttatatcaaagttgtttatcttaaatcttggctcatttgattactaggatattttacttacctttaaacaactttattgttattggtgattctctttctttttctctaaaccttagcagtaggtcttagcttgtgctaagcatatagagtccactgtggatgcaagtacaagcgaggagaggtccttcaggcaactgctcagagtgctgtgtcgagcttaatgggtataaaggagaagaaagtaaagtgtatacatacaaattttaaatatgttaaacctatgataagatacagattaaaaatcaactggatttcaaatcatattattcagtaaagaatggcatacttgccgggcatggtggctcatgcctataatcccagcacgttgggaggctgaggtgggaggagcctgggaggttgagaccagtctgagcaacatagtgagacctcatctctataaaacatcaaaaaatcagccgggcgtgatggtgcatgcctatagtcccagctacttgggaggttaaagcaggagaattgcttgaggccgggagattgaggctgcagtgagctgctattatgcccctacactccagcctgggtgacaaaacaagaccctgcctgaaaacaaaacaaaacaaaaaaagagagagagagagagaacagcacacttcaaagggtatggtctttgttgctatgctcctttatgtgcttagagttgaggaaggtggagaatatttaaggaaagctttctgtagaagtacacctgggagaagtgtaatagcaatctaggtagagaagataagcataagtgaaggcacagtagcaagagaagccatggtatattcaaagagctcataaggaggttgaccttgccatcatataaagtcctagcaggcaagtcataagatattaatccagagcagtgtgtattttagttaaggaacttggacttatatcctataaggatggagaagggtcttaggcagaagaggagtgacagcgtcagacttgcattttaaatgtaatttgggagctgtagagagagcagatttgaagaaagatttaaaatgaagtcagggagaccacttaaactgttgacctgacacctagggcaggggtaaatggaatcgaaaggagaagaatggagaggaatagaaagttgaaaaatagctacaagtaaaaattgtcaggcatggtgactggatatcagtcatgaggagaagggggaagagtttaatataaatcccaggtttctgtctatgctaattaagtggaagagagaatgtaagagaagcggtttaaagaggagctcaatccttttaggaatttgaccttgatgcacctatgagatgacaaaaggcaggtcagctggccctgagtaaaaatgtgggagttatcaacatatagctatggaaggtgaaagggaaagtatgcagagtgagaaaaatcgtgggtctaaggacatgccctgaaaatcagcaaaatattacagactagcataggataatttgtacagaattaactgtcaaagaagcaagaagaacctaaaaagtgcagtgccaacaggagtcataggggagtgagcttcaatcagcagtgtcattccttatagaatagtatagtggttctcaatgatgaggacagaagtagtcattgctttataacagtaagcaattatcagaggcaagagcagtttgagtagagcaggaaagaggaaagccacattaccacgaattatagaatgaatagaaatgactagcttggctgggtgcggtggctcacccctgtaatcctagcactttgggaggccaaggcgggtggattacctgaggtccggagttcaagaccagcctggccaacatggtgaaaccccttctctagtgaaaatacaaacaattagctgggcgcagttgtgtgcacctgtaatcccagctactgtggatgctgaggcaggagaatcgcttgaacccgggaggcagaggttgcagtgagctgagatcacaacactgtactccagcctgggctatggaacaagactccatctcaaaaaaaaaaaaaaaaaaaaaaaagactagcctgggctacgtagtgagacctcatctctacaaaaaaattttatttcatttatttatttttattttttgagatggaattttgctcttcttgcccaggctggagtgctatggcgtgatctcagctcactgcaccgactcccgggttcaagcgattctcctgcctcagcctcccaagtagctgggattataggcatgtgccaccacacctggctaattttgtatttttagtacagatggggtttcactgtgttggtcaggctggtctcgaactcctgacctcaagtgatccacccacctcagcctcccaaagtgcttggattaccggtgtgagccaccgtgcctggactacaaaaaaactttattaagtagctgggtgtgatggcatatgcctgtggtcccagctactcaaaagactgaggcaggatgattgcttgagcccaggagtttgaggttacaatgagctatgcatcaccactgtactccagcctgggtgacagagcaagacactgtcaaaataataataataataaatcagcctggggaacataaggagactctgtctctacaaaaaaataatttaaaaaaaaattacacatctactcagaaggctgatgtgggaggactgcttgagcccgggaggttgagactacagtgagctctgattgcaccactgcactccaacctgggtgccagagtgagaccctgtttccaaaacaaaagccataaagtaatactttaatatgaataaagacaaattagaaagtgagcaagtaggagataaattcactcaggtgataggacaataataaaacaattaaaaaatttaagatcctcaaaaggacaaagtaataactttacaaaacaagaaattatatagcaaaagcttgtagaaacgacgcaagataagaacaagtggatatgaaaaataatgacttaaggccaggcgcggtggctcacgcctgtaatcccagtgctttgggagtccgaggcgggcggatcacgaggtcaggagattgagaccatgctggctaacatggtgaaaccccgtctgtactaaaaatacaaaaaattagacaggtgtggtgacgggcgcctatagtcccagctacttgggagactgaggcaggagaatggcgtgaacctgggaggcagagcttgctgtgagccgagatcgcaccattgcactccagcctgggcaacagagtgagactccgtctcaaaaaaaaaagaaaagaaaagaaaagaaaagaaaaattacttcaaaatatcagcagtaaaataatagacattgaaatgtaactcagtaacaattttagactgtatatttgaacagtagttcgctcagaaagaagcacataggtagaaaaatgtgaaagattagttagttgagaaacatacagtttagagtccgggcatggaggctcacacctgtaatcccagcactttgggaggccgaggcgggtggatcacctgaggtcaggagtttgacaccagcctggccaaaatggtgaaaccctatctctactaaaacttacaaaaattagctgggcgtggtggtgggtgcctgtaatcccagctactcaggaggctgaggcatgagaatcacttgaacccaggaggcagaagttgcagtgagccgagattgcaccactgcactccagcctgggcgacagagcaaggctctgttaccaaaaaaaaaaaaaaaagaaacatagagtttagaaacgtcaacatttatataataagagttccaaaataatatgatagggagaagcaatgttcacataataactaccaagaatcttccagaattgtagacctcagattgaaagtataacttgagtgttgagcagagtaaataaaaataaatttgtatctatgtacgttgtagtgtaattgaagaccattgatttttaaaaggctagctgagagaaaagacatcttttctacataaatgtgaaaattaggttgatgatagacttgtaatttggtgacaatagatgccagaaggcaatggagtaatataccagagtgctgagctgataaaaaagatattatttttaattttacagttctatacccagctaaaattcaatacttttacacagtggcagtttaccactgtcatgcttttgttgaaaaagaaaatcctttaaaaatgtgcttcaccaacaaaatataaatgtagaggtaggagtgatatgtaagattcagaattatgatggtagttaactttgaattttataatgataatagaatagcaatacctttcatattataatttacttacatggaatgaaaacctcagacagtaatgacaagaatgatgtggagttgttcgctggcaattaaagcatattcaagacaaatattgagatactgagtagcccagaaaaaactatggtataaaaatttaaggacactgcggggcactgtggctcatgcctataatcccagcactttgggaggttgaggcaggcggatcacctgagctcaggaattcaagaccacgctggccaacgtggcaaaaccccttctctactaaaaatacaaaaattagctgggtgtggtggcacatgcctgtaatcccagctagtcaggaggctgaggcaagagaatcacttgaacccagaaggtagaggttgcagtgagccgagatcatggcactgcactccagcctgggtgacagagggagactctgtttcaaaaacaataaataaataaataaaaatttaaggacaaaccataatagaaatataatctatagcttccaaacatatagagaaaaaattactatagaaaactgtcagtgcaatacaaggcgggaaagaacagatcatacaaaataagatagtagaaataagccccaatatgtcaataatcaaacttcaatgacaggggatataagactgaatttttggccaggtgcggtggctcacgcctgtaatcccagcactttgggaggccgagatgggtggatcacctgaggtccggagtttgagaccagtctgaccaacatgaagaaactccgtctctactaaaaatacaaaattagctgggtgtcgtggcgcatgcctgtaatcccagctactctggaggctgaggcaggagaatggcttgaacccgggaggtggaggttgctgtgagccgagatcgtgccattgcactccagcctgggcaacaagagcgaaactccatctcaaaaaaaaaaaaaaaaaaaaaaaaaaaagattgaatttttgaaaacctagtcatattctgcttataaaaaaagtacaagccgggcgtggtggctcacacctgtaatcccagcactttgggaggctgaagtgggcggattgcttgaggtcaggagttggagaccagcctggccaacatcacgaaaccccgtctatactaaaaacacaaaaatttgccgggcctggtggtgggcacctgtaatcccagctatttgggaggctgaggcaggagagtcacttgaacccaggaggcacaggttgcagtgagccaagatcgtgccactgcactccagcctgggtgacagagcgagaccctgtctcagaaaaagaaaagaaaggaaaggcagggaggggaggggagaggaggggaatctgcagattgtgctattagctcgtattagtggtgtcaaattttaagtcagattctgctgtaagcaacaaatggcttcattctttcctcactattacaaatgcgagacagagaaagaaaacatggccttgtaatgtcacagactttgtcattggttaacccgagttcagagaggcttccaaatcacatcagttaattcccccagcaagtgaaagctgactgaaattatgagctgcctttaaagcaattctagccctcaagcttgtgaggagtcataaagatatactaactaagccgggcgcagtggctcactcctgtaatctagcactttgggaggccaaggcgggtggatcacctgaggtcgggagttcgagaccagcctggccaatatggtgaaaccctgtctctactaaaacatacacaaattagtcaggtgtggtggtgggcaactgtaatcccagctactcagaaggctgaggcaggagaatcacttaaacctgagaggcagaggttgcagtgagccgagattgtgccattgcactcctgcctgggcaacaagagcaagactctgtctcaaaaaaaaaaaaaaaaaagatatactaactatgtgactcttagattcataggctaaatttccttttggattgtttttcaaagactgaaaatgcctatattaggaaatatcttcactttccatctccagctcccctatttgtcagttcttctattctgacccctaagatgtggttcacattttaattacagttacatatggcagtctccatccaccatagccagccagcctgcaggcttgaagagaatgaaggagagcctaatactgccttctttctgacaagctctcatggagctttcacagttaagactctgtcgatctgttgcaatgactgaagtgtcctgtaaatgatcacttattacaaatgttcaggtagatgtgtcactttaagcattaacaatttatttttaactacatttctttattctttacatataccaattgtgcttatgcccagaaggactggatacagtatgtgaaagctgtaaaaattggctgttcattctcttctcatttaaccgcagatgaaatattggttgtccaggataaatcatccttaatgggatatttatactctttccaccaaacactgtgcatctctccaccagccgtactctccctatttccttttattttcccagacaaggtctcattctgttgtctaggctggtgtgcaatggtgcaatcatggctcactgcagcctcaacctcctgggctcaggtgatcctcctacctcagcctcccaagtagctgggactgtaggcatgagccaccatgccctgctaaacttttctttttctttcttttttttttttttgtagagacagggttttgccatgttgcccaggctggtctcaaactcctgtgctcaagtgatccgcccaccttggcttcccaaagtgctgggattacaaaggtgtgagccaccgcacccggcccccctcgttttttaaagatggaatttctctctctttctcaggctggactcagactcctagactgaaagctatcctctcacctcagcctcccaagtagctgagacttatttataaactttccagttaattgtgactacagttatgcacagattaaacataggtttattctggttggtaatgatcataaagaatgatctgactggctatctttgggaatgattgtttgtagactgtagtaaagatgaaaagtccaaactgatttttatctttttgtgctgttaaagtataaggatctagaatttttatttatggacattgatgtcagaagcatatgtaggtagttttaaaactgaaaatatagcttgtttttacctctcatctaactttggagaccacagtcgcctttgcagatctatctagacaacttctgaggtttattcaagcctcatttgttgctgctctaaattcttgctctgaccctatctgaaatcagtgtagtctgaactactagagagacgttattccgtaacacagtgaatctcagaatttattttttcaactgatacttccagctctggattctgtgacatttgcccaaagggaaacaccggtcccttggattacactgtgcatccattgtctgaactgtcacagcaatagcgcgtaaagctgtttgcatagcgtgctaactctatcagggtcatttccagtctgtggccgctaaaaatgaaaaccatgccccagccgggacaagaacagggtcaacagctggcaaaggatatggcaatcatttatataaatatgctttctcaagcccacaaaaacaaaaaaccccaacccaacagctgggaagggttggaagtagccccaaggctggttagtccccttccagatggggaggttagactggggctagccagactgctccacatagacttccgattcgaattagaaatgaaaagaggagaggaaagggaaaaggaagaaagcctacaagcatgactgctctgcttttcacctaacttaatcaaataagtgaagactttctgagacggaaggcttgcatttatcggcattcatgctccgttttttctgtttatcatagggtctaatacacattttaactgctgaaacagaaagcatatatgctctaaagtatagtttatatataatgtcatggttatttgtagagagattgaagaaccggtctcagatttatgtcctgtttacatctcccaaacacttatgtagaacattcaatgctagagaagataataattgtggtgttggctcactcccagaattttatccaagggatagggttcatttttgtaatttgatttacttcataatacatcgttattgcacatctaatatatccaacagaataacaaataccgttttcctgggttcaccttaaggttgcataccatgaggcaaagtattatttttgtaacctgttgatgcttcaagaggcaaaggtgaagagtatatgactttcaaactcttccaagagtgacatagtaaaataaaagacaccacagtgatgaagaaaaaatttgttctcattatctagaaaagggccgcttcttcctaataatggagagttctgctgaagccaaattgaatggcaagcagcactttcttcctctccagtcttacgtttgcttaaggaaaagcttacataatgaatacatttataggtgtaggatgagctcatgatatcagaatccataaagatatataaattaggctcttttgccaacattgaggcattgtcttagagaatcttctgctttgacatagaagttaggtaatgcattttccttcttgtaatgatctgcctgaaacaaacatttagccttactcgtggaatgtcaaaactagaaggaactgtagtgatcatctcagatacctcctctaatgagtagtaaagatcagaaagttagaatgtgcacagggaggatgctgtggacccctcaatcaggtatacatcttccaactatatacacacagaggaccctatactgagaaagaatagtgccaagccagtctggataaagaccctcgggagacctgaattatcaaagctatctgctgatccctcaaacactcagatttactgtgtaattgtataaagtaaatttcccactttgttctgtggccctatagtatcaaaacaaatgtttctcaagcatcaacactttattagaaattctcatgacttctagatgtggttttggtcatttccatagataagtaataagatgagtgtgttaggtgttggctctgaaagtctatcccatctatctatatagtaatgaatattagattttaagcttgttgggggcaagaaaagtaggtcatcttcatgtttatatccactgagtctggcacatatgagtacttagtggatgtttgctgatatgcgattaagataaagtgcaagatatgttttttttttttctttttttttttttgagacggagtctcactctgtcccccaggctggagtgcagtggcccaatctcagcttactgcaagctccacctcccaggttcatgccattctcctgcctcagcctcccaagtagctgggactacaggcgccagccaccacacccagctaattttttgcatttttagtagagatggggtttcaccgtgttagccaggatgttctcgatctcctgacctcgtgatccacccgcctcggactcccaaagtgctgggattacaggcctgagccactgtgcccagcccgatatgttgattttcaaataattcattaatttaagtattttcttctataatagctacaacaattttatactaaaacttttggggggaagggccattaccttaatttacacaatagatcagttaagttttgcaagaaggtgaaagtagacaaacatgtttttgacacattgttattgctattcctgcggtctttgattctgacccatttttagcttctgtgcatttacttttagttaatctgtttgatttgaatacactgttcagttagtctcaaacactttcttagcatttatcttcaaaccttaagtgtaaaaatgagacagaggcttagaggtgtcctcggaattttagaactaacggtttaatttcctgactcttagagtccaaatgttttcttagattgatgtggattggtttaacgtaattggaagtttgaaaggtacatgtttctaaagcttttaagataatgatacttagaaatcactgattgttccttgatgatgaatgcctttaatatatgtttacaagctccaaaacttttaatatatcttaccatactctgattactagaaatatataaatgaaaccaacatttctctatcctggaaaaaaagtgtccagtagagtctgtccttcctgagcttagttaaagcaattcttgtatctttgttttatattttttaaccttttccaatccttaatacatttgtggtcttactgggatatgccaggaagaaatttcttccttctatttcttctccctctttttagctgtctactgtataccatgtagaaccacaaaatgcatgtttttatctgttctgttgtgtagaatgtatatgctgccagccagccttactctttcctctctacactgccacagctacaactgcttccctgtcaaacattagaaaaacacaggtgggcacctagtgcatggtgttacagtaaagacaactcgacatcatactgactacaaattacctcccctagtttaaaggcaaatagtagctatcacaaccaaatttagaatgtgacaccattgtttaggtgtatgtgattcatttttattatctaatcacatatttttttcccttctaatttgtgccctgactgcaccttgtgaaaggttagaactgggataataactgtgatgaacaagttattcaagaaatacttgcaaggtggacaatgttaactttgaacagtgaacacaaagggtaatgaattactaataccatagttcccttctcaaacagcagtgacagcttaattttgataggatccctatgatctttgtaagcgtattcatgccaggaatgttgtcctcagcaatagatcctatctctatcccttttccaaaagcccggtaaagttagtttgcttaaaactacctgaaaatgtctttctagacatccaccttactgcagggccctagggtcataacctcttaaccttacgggttataggtctcttgctttttgatctttcttggttctttagtttttgcctacttcctccacaacattcaagccttgttatataaggaaattggaaacaccaattttggatgagataagttaccctttcttccagaataatccaaaaagatgattttaaatagaaacatgcttgggaaaaatttagcaaaactacagcatcctgtctaagccagtttgaagttgccccccttcatttcttatcctctttataaaaaacaaaacaaaaccaacttagaacttactgttgacttagtgataaagtttttattcaggtcccaaaggcagcttgcttgagacatcagaaggagtcagagtggtctgagcgaatgagaaggagattaatattaatacaattagttagttagcttattattcttgccttactgggcagtacactgtttgataatagtgacaactaacatcaatttggcacttactattgacaaagcattatttattattttatagccatagcaacttggtaaaggagagattattattcttatttcataataaaggaacctgagcttcagaaagggccctcggcttgccgaaggccgtatggtaaatcaatgaccgagctggtgtggaatgttagcctcctggatcctgatcgttcagcctccgaaacattcctactgaagaggcattaggactagagcgtatttcttttgattatcaatgcgggtggtagtgaggtatcctcagctgtttggctggctctcttattatattagtatctttttactattatcttgcttctgtttcagccaaaatttggattttgtttctttgccacacccataggatcaggtacagttaacctgtttgagcctaataatcaagtattgtactgaaattccaaatagaattggaaaatgtacttttttgatgggctacctttcctctttcctgcctcatccaaacagtctccattagaaataataaaaaccctcataggattttaaagccaagttagcagccctgagtcaggacaggtgtttatttttaattcatactcagaaagcactgtttacccatttaccagacagagcaagaaaggacaaatagtatatataaaaaaaaaaagaattataggtcatacagttgtcttttcattccataaaaattaggaggtctcttttaaaacattaagataatgttgaaataaatacattttaacccgaacctaaaaccaaacaatgacaggaatatttctccttaaatgcagactacctggcattcgcaggtatctgctagaggcaaagtcagaacgaatgaggaggcctgcagacagtaatcatacttccatctcatggaaatcacccacttgcctgactcacaagagcactgaagtgtgtgtgtttatgtgtgtatttgttgtgaatttgttttgattttatcaggcttgccagctgcataagcgggcaaagaatgtaatgtggaaaccatccattgccactggaaaaaggatccaagaggaattccttaagctgggaacatgagctgtgagcaacatgtttaaatagctaaatatccaaagtttgagtcatgttcatttattttgggggatacactctcttctttgaggctgaaagagtccttctggcttagactataacaaatgtggtgctggaggaggtgagagactggaagccctagcgagtttgctcaggttgtggttaatggtgagagagggtaccatgacccccttcgtgaagtacgttccacgttcaatctgaaaaatccatgggcttttaaaaaagccttttctgtactttccagtgagggagaaaggtaagggaaaggaaactaactttttttttttttttttgagacagggtctcgctctgtcgcccaggctgcagtgcagtggcgcaatctcggctcactgcaacctccgcctcccgggttcaagtgattctcctgcctcagcctactaagtagctgggattacgggaatgtgacaccacgctcggctagtttttgttatttttagtagagaccgggtttcaccatgttgatgaagctggtctcaaactcctgacctcgtgatcctcccacctcagcctcccaaagtgctgggattacaggtgtgagccactgtgcccggcctctttttttttttttttttttttttgtaatttttatgtgccagacactattccaggtactttcagaaaggtggtgatttttttttttttttttttaaagagatggagtctcgctctgtctcccaggttggagtgcagtggtgtgatctcagctcactacaagctctgcctcccgggttcacgccgttctcctgcctcagcctcctgagtagctgggactacaggcacccaaaaaggtggtgatttttctccccattttgcggatgaggaaactgatgagatctgaaacgatttgcgcaatctatcacagcgaataaggttgggatgaggattttaacccaagatctggcttcaatgcccatgcttttcttaactcccttgaagccttaacactctcaacaaagagtttactttcctttttcccctcctcattttcttttttttttaaaatattacttatttaatttttaatggtcgagtttacttttcttcttattttacttgtgtttcttctaaaggagctgtctgggctaactactccattggttagaatatgatgcctttgagcccaaaatcttgtttgatctcagaataggccaagttaatattttacaaagaaaagctgagaattaaatggcatcaccattagcctgccattgtcagaagaatatgagatgagctaagagtatatctgactcagaaaaacaactcaaaagcatgtcttgttgttctcagatggtctgagttttcaaaagaaaaaagatgatgagtcaatcgtagaaataaatagcctaaatatctcatagattaagtcaattaagtaaagattccccttatgtatttgccctattttaatgtaggtaatcaaggtactgaattttttctagacaggttgtagtatcagcgcagtgatgaaagtagtcttcctctgctgtgaattagggctaatattaaattttgtgtggttgctgaagaagtttactgtgcactagctctctcttcaaaaaaattatttaagttacattaaattttatttatttatgtgtagctcctagatctaaaagggaatagttttttcccctcacaatttcaagacttctcttttattcttctttttttcgagacagtttcactcttgtcactcaggctggagtacaatggcacgatcttggctcactgcagcctctacttcctgggttcaaatgattctcctgcctcagcctcccgagttgctgggattacaggtgcccgacaccacacctggctaatttttgtattattagtagaaacagggtttcgccatgttggtcaggctggtttcaaactcctgaccttgtgatctgctcacctcggcctcccaaagtgctggtatcacaggtgtgagccaccgcgcctgggcttcattacaatttttattttgtcttcctgatttctgggggataagaggggaaccaaaaagatagtttatgaagaacttaacagtttccacattgccatttctgtaaaatcaggaaaagaacaacagatgtattacagactagttagggagaaaagtgatcaaaaaacacttgatatttttaaattcgtggaaactttgagctacatattttgccttccgttcatctttgtaaccatttttttgtttcaggttgagtgtgattctttcttcccagctggaactttcagccttgtccccgagaccaaaagctcaatcagtgtcactctgcagagaatgttttcagtatacgagtgtcctctccttggcactcagttgggacagtcagcactgcccctgccccagagctaattaactgcattgctatcagagctctgaagtgacagaggcaaagggcagagaatggaaccaagagatcattcaaaatggggttcaagctgggaggcagtgcccggcccccttctttcacagctggggttttggcagcctgtcctcgggttgttcagcctggtgaccctagccgcctgtgatttactaactgttttacaaatgtttcctcgctctgggaggtttgatacactcttcatcctcctcagctcaccagagtcactcagtctctgagccaaacctgcctttgtttacaacttttccggaaattttcacagagggagagaaactctccctcctctttcagtgttttatttttaagtcaacacttttctcaagtttatttgtgctaaaccaaattctcctacaaggtattgctctgtattcaaatgggaattgctgcatttctataaatagaatgaaggtcatgtgaacgagttcagaagattctagatatcacattttacgggacctttacatttagttcactattttttgaaaataatattctatgtttggatttgtctttttttcccacattcatatttgactgcgcattatgtgaaaaattgaatttgggaaacattgagtggaatattttttaagctgaaatacccatgttaaaaataacaaaatgtgttgttgcttcatcattgtaactttcttaaaaacagaatttatagcccctttattaaatatttctagaatataattgcctctgaaaacacagtaccagggtttttttgttttcgtttttctttaaatctcattcccattaattgctcagtctttaccttggcggagaatgaaaaactgccttggaacttattaataagcatttagaaaaactcgacaaaaaattaaagaattggcctggcatggtggctcatgtctgtaatccaagcactttaggaggctgaggcacgcagatcagttgaggccaggagttcgagaccagcctgggcaacagggcaaaacaccttctcaacaaaaaatatagaaattagcctggcgtggcggcacatacctgtagtcccagctactcaggaggctgaagtggaaggatcacctgagcccagagaggttgaggctgcagtgagccatgattgtgccagagtgagaccttgtctcaaaaaaaattaaagaatgacaggataaaaatttagggaggccgattccatctgcaatcaaaagctaacttttggtccacactaagtaagaagtattatttttctcatttctacctatgaaaaaaaggttgaaactgaaagaaaaaaaaaggcattatttattttcctccttttctgtcttctagagccagaacagacagaatatatcctaaattggatacagccagagaatagtttactgataaaatatgttttaggaaggaaaactggttacatttcagcatatacagctggacttcctggtgggcctcccacattgtcaacatcagtaccatttatttgttgaccaacagaagaccaccagaatgaggtattttcatttctgcatacttctaattctacaagaaagatagctgttgagagagctaatatcaaggaaatggcaaacaaacaccttaggtgatcctgtgtgacattcaggaactattgcagacttccaggactcaagacagtctcctcagccataatgtcattgaccttgacatactcagaacaaattggtctgtgtgattgctaccacatgctgtagcgcctcctaaccctgccgttggtctggagtgaagcagagcaggagaaagggctcctcatcagaggatatgcttcttttatgttccttagactcttgcccagcatgcttttcccactctatttagtcttaaaatggctaatttaaagtttctgaagctttgtaggagccgcagagtgtacctagttttgccaggcaaggactgaataggtgaatagtcattgtattcttagggtgtgaaactgtttcgggagcaaaagataaggcaaacacaaccaaaaagacagcccttttgcttagttaggaagataatttatgtccccaaagctctttcagtgatctgtacccatcagaccagtagaatttgaacttttttcccaactgaagagtcaactgagatgagtaataagcacactcctcacttctggttttcttttacgtctgtaggtttttttcatttatatggagaacacaagtcgtagccagtgaaagtttgtataggcccctctgtttcttgcactctagttataggcacttgctaaatgtttcttgagtggatgaatgaataagtgaatcctggacagattgagatgtatggggtgagtcataatcctggcaaaaccctaattaaacacagtggaaccattgccttatgcacagggcaacctcaggcattctgcgttcatcgtgtctgcagtgttctccaaattctgaagcagagatgtctagatgcttgtttagtgcggagggtcactttctttatattttaaaatcagtaaggtcatacttaacttcgtttgtacatattaatatatccataaatgttggtagttcctttgggtactatgagtgactataatattaactaaactgcatttttagattagaaaattgtgaggggggaccaagcacagtggctcacacctgtaatcccagcactttgggaggccaaggcggatggatcacccgaggtcaggagttcgagaccagcctgatcaacgtggtgaaacccccgtctctactaaacttacagaaattagccgggcatggttgtgcacacctgtaatctcagctactcgggaggctgaagcaggagaatcgcttgaacctgggaggcagaggttgacgtgagccaagatctcgccattgcacttcagcctgggcaacaagagcgaaactctgtctcaaaaaaaaaaaaaaaaaaaaaaaaaaaattgtgaagggggaatcccctatgaatgtaccagtttttactttgatccaatcaagttgttttgtatggtttgttgtttgttttttggtttttggtgtttttttttttaatttgatttctacatggattcaaaataattttgtttggaaagaacagatatgtcaggggaagaagtgacacgtaagctacaacagagtatatttttcaagcacctctttatttgaagatgcaatattagtatttgttctttcttagcaccttttcgaagttttcttcacatgaactcttgcagtgtgccaaggatagcagagatgtttttcaaacgtttattggctacacacataaaagaacagaaattcctatttttcttctctgtccttatattactatatcacctgttctccagcctatgggtacaagtgattgacatcgttttcttgtcgataagtatgatacttatacatctgtcttgttcttcttactgtctgtgtattaatatttctagatgaagatatatattaattcatttaatcttcattataactttaggatgcagatactgttattattctttgatagatgaggaaactaagttcaagaaagatcccaaatgtgtccaaggttacaaagacagtgaatgcatgactagattcaaaccaagatgccctggctcctgaagctgtgctcctaatcaccaagctgtttcccatggcattctattctgtgaaggtattatcatctagttgatggcttccctatggatgttgtctaactttttttgcatttacaaacaaaactgcagtgaacatctttatacatatttccttgtgcagtggttagcatcttagaaacttgaatatatctgcttcttagcctcccacccaaatttctatgttgctttagaatccagaggagaaaatccgccctcttacatggctcaaagaaatatgctcacagagtgcccatttttcagttttcttagagttgtgagatttaaactaagagaaataaggtacatatatatttgtgtgttgcttagtgagaagtggtgggtaggaataatttttctgtttttgctgagatcttattagtaacatggctaaaaacattggctttgcaaaattctcagtcagattcttgcttttaaatagaattagaggggaaaattactattagtcttttatatggaaataacaaaaaacttaggagataatgttgatcacatacccttttttattatatcttagtaacttatttaatattttagaaagtggcttataaaaaatttattgatttctacttagtatttcaaatctaaattcaggatgggaaggtttcatgaactttccagagactagtaacttcctattccactttcctgggcttggtattttagttattgtattgtctactcatatatttgacttttcactgtgtttcattttgtctaaagcgggactcttctcctcccagggaccagagaattttcttcttgatgttctgttaaagccttgctaagctctgactcagcctgactttaaatccatagtttcattttctaacattattaatgattaatcttgaagcaccgaagaaatgaaatgtgctagtaagtgtcgttaaaaaactgagagtttttcttctgttgtggacatttcttgtccataacagcttgagtttaactcgaatctcattagctcagcttaatttgaggatgttctgaaaagagagagggagaaacaaagcacgtggtcatcccaaatgctaatatcagagactctcttttaaagctactaggtccacgcttctatgaagaaagcaggtatccatgttgttgatgctccctagagagagcctcagacacattttgttcccaaacagaattagaaggaaaaggtctgcttagctgtcttttcctgtttaaaatacagctgcccctgcagtagagcccttgtcagctcgctggtgctctctgcaaacttgcagtgcaagtctatgatataagtggtgtagagtggttttgttgctaagagaaaagtgctaaaaaggaaaaaaaaaaaaaaaggagggcctgtatctcttgtgtagctcagatcctttgggtatttaatgtacagtttcagcaaaagacactcagaattatacctctggttggttcaaaattgcttaaatgttgaaacatatggtctcatgttccatttgttagcaaacaaccagctgttctcagcctgccaaatccaagtaaacatccactgtgtggaagagtgaatctgaaatggttcagtaaaaacataaaagctgtttttgctgaagaagaagaaaaaaaaaaggccaccccgaaacaacagctagtgaaaaaaaaaaaaaaatcttgttctgataacgtcttttccctggcttgcttacagtggactgtggagtaggaatgactctagagccgtttcaatttaaaaagatttgtaggcaaacttgctgtcctcttctgttgctgaaaatcgtgattgtcttggttacagtgattattttaataaaatgcaattatctgaataattaatgtatttgactactctactgtgtcctccattcacagaggccaaaatgtcaaagatcaagtagattgggagaataggaaaattctcattataaaggcaaggggaggagggaaaggatgaaatatttggaatttcagtgcagtggtttctatttatccgaaatgtcaagggcagtgtaaaatgtatttttaaaatgtgtttctgtatggtttgtgcccattcttggcgtggctgtggctgtacagagaccattgttctttgaggaatatgagggggtgtctttgtccaaagtgacaaaaagaagacttggaagactgggcttcctttgttcctgtgcggtgctgtaaaatttggtttgaaattaggacctcagggaaggaccttcaatagagagctttcatttcctgccagcattttaatcactctggggtttaaagtggatggccggccagcataatggccctatgtttaatagaacagcttgtatcttgaaggccagttaagggatctgtcatccgcccaatattcgtcttttctgtttcctgtccatttatgaagatcacccacccttttaggtggcttccctggatcattttgtaggggagctgctgccactgcttcttaaagaggctgaacagaaacccagttgaatgtggtccagtcttcagcccacgcagggaagttctgcagagtgctttaattagacacgaagttcaccacatttgggagttgattccatcagttgtagagggactgtgtcagatttcacaaaaaatatagaattggaagaagattaaaatttatccatatctcagaattattggcacctattgacctgatatgtgctcacatcatcactgtggtggatgttaatgtcatcctgtcatgcacaggagtaacttatctcctgaggggtgaagtaacctggtgggtttgatcctgttgtatacaaaggaaattcacaatttttctaatacagtggcttgttaactctgaaggcaggcttcctttggaaccctttagaaatttacctttatagtttatgagatgatatccagaactcctaaaggagtaaatattggagacaagacttgaaagagagagccagcagtaagaagtaagggttctgaatttctttcccagctcatgcctagtgggtaagagtaagataacatcagtaaaagcctgagattcactaagttttcatgtaggaactgtcactgaaattgctctgtgaccaggtgctaagaatggccttgtgttgtcagtaatagtgaactgcttggcagaggtaattttagaggtaactattaaataggatcacaaagtgtttccctaactgagtaataacatacatgaatgaggggagagaaggaagggaccttttcaactacgagcacactctctatcccatctcatagccagttgtgctgcagacagacaaaaccagagaagccgcttttcacggacatttttcttttttgcagatacctaggggttatcatggggaaacaaaggcatgtataaacctcattcagcagtcttttcagatagagtctgaaaagagtctatcaccaatctatctgaggtcagcttaatccatacccacagagatgatgagccaaaggcttccctaagctagggtcccatagtcttccccaagctagggtcccagcgctgggtgggggacaggagaaaaggcctgaggcacgggggagaaaaggcagttgcagatagtaatgtttggaggcatgctcagttattcagaagaaatggaatgacgttaaaattctcccaaaaaaggttggaaccacctctgcttccctttccccactctgtaatcagtaatcattgtctggtgtgttcagatgataatccagttggccaccaaggggttgtgcttccttactgactgtatttgtgatctgtaagacttttcaaacacaggtttaaacatccagagactccagcctctttgacagtcattctcccactgtgtcccttttgacttcttttgtcatgtctctagtgcagatttcccagctgcccaatttgagcccttttgagttgacctcccttggatgagtagctctttgaaagctgatttaaagtgagtgttgctccacctaagagctgttggctgaaaaaagcactgtctacaacagcagaggtggccgagaaaggcagacaggctctcctgaggctggtgttgcagatttgcattggtctagtaggaattatgcatcattagactgaacttcttatgtttgcatccaggtcatttctccataaaaaaaaaaaaaaaatgccactgacattacagccaaggaaccatcattgtacttacaccagtctgttcccacacatgaagtgttatgcttcaaataaccgctcaacagctcatctgaaggtccagagtatgtttactgggtaaaatatttcaggcatagacttggagagcaagctgcccaccagggcagggccttagcataaagttaatatcgtcaaagatctgactataatccatttcattcactgttgcagtttgctgtgtgggtgtttctacaatgtgggaaacttgtttcattgaagagtctgaatattttgtaaggatgtgaagagttgcaaataatcttttctgtaaggctatgaggagaaacaaagcagctaatgttagaaagaactggtacacgattgttttctgtcatttgtaaaacaaaataggaatattctggtctttacagatttatatcctcaacttgttgctccttaaggattatacaaaaagcatacctatgaaaagatctgttctactggaaggatatcctattttgaagctcaaatagttttatttttatttacgtatttattttcagaaatagcgtctccgtctgtcacccaggctggagtgcagcagtgtaatcatagctcactgcagcctcgaactcctgggctgaagtgatcctccatcctcagcctcccaaagcactgagataactagtgagggccaccacgcccagccttgaagctcaaataattttaaaatataagatgatatatgtaataaagcataattctttgtctatagaaaatgtgtctgtatgttcaaaaggctacctaaattttgttatattaacgaaagaaaaggtatggaataaagtgtatatatatatatataaaaactatattgtatatttgcaatatagtaaaaataacatatacatgtataaagatatatacatataaacatataaatatttctgtgtattcaagtcagtagagttacccaagatgccttcatttttgcctttaggcagtgagactatgctagccttaactgaaactttattagattcagtggtgctagtttccaatttctatttctcagcttctctttggaatcacaattcattagaatcattcattagaaaatgaattggcctttgtggataccccattcttagactatagcatttggttagcatcgttcctgtgggctccctttggaaaatttgcctgtatctatatgagtcccaagtccttcctttcaaaagcctttgcttatactttatcccttattcagttaatacctttttcattatattgtacataagtgcttttatgttttagatttgaatcccaactagatagtttgggatagttctttggggcaggacccatgtcacactttttctgtattcctcagaaccaagcacactatttagcatgtaggtgttagtttcctttccttgttaaattgttatatatatatttttgtttgtttgtttgttttttgttttttgttttgagattgagtctcactctgtcacccaggctggagtgcggtggtgcagtcttggctcactgcaacctctggtccccgggttcaagcgatcctcctgcctcagcttctcgagtagctgggattacaggctcctgccaccatgcccggctaatttttgtatttttagtagaaacggggtttcaccagcttggccaggctggtcttgaactcctgacctcgtgatccacccgcctcgacttcccaaagtgctgggattacaggtgtgagccaccgcgcctggcctattcatatatttttatatgaaaaaagtaaggcatgaaaagagtcttattatttgtttagttgacaggaaatttaaagaaaaagtattgctataaccatcctacttcaaattcctagaataatctttcccactcctttcattttagctcttctctcttcctgacctataactgtctttaatggtcttatatttgcatgtttttttaagtagtgaaagaaggttggaggaggactgtacagatggatagatgtacatttaactgcagagactggattagaacacacacattcagaattttctggatgtggtttagtatatcatgattaccaaatcacagctcccaacatgtgattataagggtagcaggcaggaaagaatttaatgaaatcttgaactttgccttctgcccttttgtatttgtcccagggtagcagagaagagactatagaaatgtagtgcagagggaagacaagtgaggaattatggcagccaaatgtctcccaaagtgaaagacaagaaaaatgggggcttcactgcacagtaggctggagattctacctaacctcacaggactcctagcatggctggtttcaaaactcgtttgagctataggaataggccattcgtggtggctcacacctgtaatcccagcattttgggagacctcacaaggatcacgtgaggtcaggagttcaagaccagcctgtccaacatggcgaaaccccatctctattaaaaaatacaaaaattagccaggtgtggtggcaggcacctgtaatcccagctacttgggaggccaaggcagggagaattgtttgaacctgggaggtggaggttgcggtgagctgagatcatgccattgcactccagcctcggccacagagcaagaccctatctcaaaaataaataaataaataaataaataaatattttaggctgggcgcagtggctcatgcctgtaatcccagcactttgcaaggccgaggcaggtggatcacaaggtcaggagatggagatcatcctggctaacatggtgaaaccccgtctctactaaaaataccaaaaaaaaaaaattagctgggcgtggcggcgggcgcctgtagtcccagctactccggaggctgaggcagaagaacagcatgaacctgggaggcggagcttgcagtgagccgagatcgcgccactgcactccagcctgggcgacagagcaagactccatctcaaaaaaaaagaaaaaaagaaaaaaattcaaaaacattttttaatgaactatagggatattttgatggactgttctttggaattaacaggtccacaagccagtggcttttctggaaattactgaaagctaattcttcagaagagtatgttctagctaagggtgtactataaaggtggtaaccagtagctagcaataacaagcttgttgttggtttcactgcagaaaatttaccacttgcatgtacttactgcattggtttaccctcaagaaaaagaaatacagcctctatatacctcttacacccactagatagaactaatcaggatctcttttgatcactggagcagataagcaggaaatataactaaccaagattaatttcacatattatctattattatagtttttcctaatctaccccttgacttaatctaattattttcagttcagggagcttcctgaaaatggaggacaaggatacatttcacctatgtcttatgctttaactctttttagagaggagaacaaatctcttttgaaattcatttgttaaagaaaatatttcagagtcactagcaaaagaaaactactttcttagttgattctttttgctctggatggagaatctagagatctggggttttactcatcactgtcagtaactagctctctgtccttctgacacttcacctctctgttcttcagttttgtattttgtgaagcatctacactagatgattcctgtcctccctctagatttgtagtaattctatgatatattacttgaagaacagaggcaacatttaaatgtaaatttccaaacacctgcattccaacatctccataaagtgcgaaccaagatacattatgccactgactataaaatacagaggaacatactttttaagccacttaagctcaaactaaaattgttagaatttaaagaagtgtggaaggttaacattaacctctcccaatttccatctcttttcacatttacctccttaatttgctaacccctcagttcttgatatccaggctccattaaatgtgaacactaacgtctcttagtgcagtagttctcaaccttgactatatattagaattccttggagaccttttaaaaattccagttgaagttggagcttaggcatcagtatttttcagactccctgagtaattctagtgtacagccagatttgaaaacctttgtcttagtcagatctctgtgcttttcaggatataataggtaaatccacttctctagtatattcaaatatatattttggttggttctcccagtagtagatcgctgatatttcagaacactctgctgaatattttattgaaattttattttattgaattttattgcatagattttattccatactaatttcctgatagtcatatcacttcctttggagagatagcactgtttcagattagggggcacaatgtgaattttctattcccatttcctaagattaaattttaagctagcagggagattccttaaagtatcatgggatgtccagaagttcaggacggcctgagacagatgagtggatttagagtggtgttgatgtgcgtttgtttataacacaagatgcccctagtgggattatatcaccattttgtcagatttttcttaagtctacaaggtactgaaggggaagcttttttctttcagcagttggctctagctaaaccagaagtataaagtaaaaacacttaacagctcaaatcgacatatcaaattgaaacgtgtaggattatagtatgtatcattgtacctatgaactaagcaagtcaataagtatgtgtttattttattttattttattttattttattttatttatttatttttgagttggagtcttgctctgtcgcccaggctgaagtgcaatggcaatctcggctcactgcaacctccatctcccgggttcaagcgattctcctgcctcagcctcctgagtagctgggattacaggcacccgccaccacgcccagctaatttttgtatttttagtagagacggggtttcaccatgttagtcaggctggtcttgaactcctgacctcaggatccacccacctcagcctcccaaagtgctgggattacaggcatgagccaccgtgcccagcctatatgttgattttatgtgacatgagatgattttcaaatagactattaaaatgcaggatttaaatgtgcatctgcttgaatctaaataccttcatataggtagtcaatctgcaaagttgtttgcctaccatgtgtagtttcaagttagcactagttttggccgggtggggtggctgacacctgtaatcccagcactttgggaggctgaggtgggtggatcacgaggtcaggagatcgagaccatcctggctaacacggtgaaaccccgtctctactaaaaaaatacaaaaaattagctgggtgtggtggcacactcctgcagtcccagctactcaggaggctgaggcaggagaatcgcttgaacccaggaggcggaggttgcagtgagctgagatcgtgccactgcactccagcctgagtgacagagcaagactccatctcaaataaataaataaacaaataaaaataaagttagcactagttttaaagtatcctccattttttgtgatagtgaaaatctaggttcctgaaaagaatagattatttccccagctggatgatttccagtccttacaatggtttggaagcatttggtaggcatataatggccccacaatcgttttggcttagtttggcttgccccagtaatgtaaattataggaaatctttcttgaacaagataaacaggaactaagagcagaaatgctttcccccacccacctcccctcatggttatttggagctattaaaggagtgggcaaataaatgaagggcatattcccaggacctagacactccaaaagtctgcatttttatcctgttaggttttccagacctgatatcattaggcagcttcctctgactagttgattttcttgagaaacattattcttgatcccgtaacatcccacactgctttgcttctactcctctaagccttttttcccctcccttattaaaagtaattttttacagaaattcctagcgccaagcacaaaataaactagaaaagcgtcggacttctctgtaacaacagtcttggtggctgactttgttgctcctgtgagaggccttcatgcttttgaatgagttctgttacaacagatcactgataatttagtggactggttaccaccagaatccttgggattatctgaccttctccaagtagctctccatttcagtattgctatgtttaccatctggttattgtatcacaatctcaatccagccagaacaagaagaactgagatggttaaaggaaagactcctaaatgttgggtcatgagagattaaattgggcatcttacaacttgttcctcctggagctgactacactgactttctcagtctgaagtcccctctctactgccgcattccaaggctgctgtgagcccattatcacagtgagtagtagcatccaaaggttaggtaatgccccttttcctagccgaaagactgaagaccgaattctcctaagattgttgggcttaccttaaattcttctattaaaatggaaaatgcccaaaccccagtctgtctgtccttagagccaggaaaaaggactctgagacgtacatgctgttggcatcagttaaatttcatgttcctagaggtcctacaatcctgtatgtaaagctacagtgagtaattgcaactgcattataattattttggtaatgactcccttcctctcaccaagaggcacagggatggatctgcacagttgcctgctatgaacattgtggttcaagtagctgatatttgttgtttaggcaagcaagacatccagctgatgggctgaacatctccattccatcctgctgtttagttttgtgattaaatagccacttactcatttcctgtattgtcacataacttttcagttctcagtttgctatgaggacagagacttagctagggttactgcaggtccacatttgcctaggtcccagctttacttgtaccagtttaattatcattgccgcttatgtcacccaaaagtgtaccagtttggatgatagtcaccttatttatcaccctacattaaacataggagaaccaaaagaaagagctactaaatggaatgataccagaatctgtgcttctaaagtaattagaattagcctgtatgtcccattgttttcaacacaagtagtgtcacttgaatccaaaaaagtgatctccctcctcattttctgtttgctgataaaggatggctctctagaattaggattctgcgctccgtaactaatatttttataggaaatatgaaatgaagtaaagtccaaaagcaaacaggtctgtagcctttttgagaagtgttcactcttcttatgggggacgaaggtgagtagatgatggtaaagtaggttgtcctctaaacatacaatctctgagaaagatccttgtccagaaatcctgtgtctcagtggtacccagcgataccctggagaggaacattccagtgattcctttctgggcatatttcctagggagttttgggagtcatgcagtgatcaggttcaggacttttgggtcagacttaacatgagtcttcctttctcacaggtggcccattgacttggtctctgtgtgcccatattactggtgctgccagctcagggagtttatgaaattttgatgtagaaattagattgttgcttatcttgtaccttcttgctcatagtattgacagtaccactgaattgcttgaggcagatagcatctcagcgatcactgtgctatttcagctttctgctgctgacaacatcagaagtgttttaacagggttttaatgggcagcctctgtagctccttggagggttgcaaatagctgccgtgagaaaccctctctgctgctctgggctgacatgccctcttttctcatccagctgctgcttgtttagatggccgccttcctggtgacaagcacttcttatttgggctgagcagtactaggacttgaattccagagatgagattgtgtaacataaaaaaggaaaggtcttttaaggacgtttttttcccatcctgtttggggtaggaaaaacaaggcaggttatggggggagaggagtagggcaagaaagagggtctaaccagaaataagtttgccattcccacaacctttcagaggaaaattctggtgtgccgttaaaactaaagttttcggccgggcgcggtggctcacgcctgtaatcccagcactttgggaggttgaggtgggcagatcacacggtcaggagtttgagaccagcctggccaatacagtgaaatcacgtctctactaataatacaaaaattagccaggcgtggtggcaggcgcctctaatcccagctactcaggaggctgaggcaggagagtcgcttgaatctgggaggcagaggttgcagtgagccaagattgtgccactgcacttcagcctgggcaacagagtgagactccatctcaaaaaacaaacaaaaaacaaaaaaactgaagttttctcatttgatggagtcacaataatctatttggagaatatcaggcccacagcttctattttctatttaatagcttgcccacattttagagtttacagttaattaatgctactttgtcaacttggttccattatttgatcttcagattcaacaaagtagccgaattctcaactaatgacttaaaacttcaaattttaggattaaacagaatggatatccactccacctggaattctctttgctaaaacaatgaggtagttcagtgaggtaatacaatgacactacattgatttcccccctgtggcgccaaagacagttcttgatctctacacccagtgacaacagggtactcaaaagggaactagtggtaagaatggaagaaaaaaaaagtggccaaattaacaaggttgttggtgtgatacaagaacttggtctaatcaggaggagcctctgaggaaaagatgtctgtgttccacctagaaagtgtagttcggctgggcgcggtggctcacgcctgtaatcccagcactttgggaggccgaggtgggtggatcacgaggtcaggagatcgagaccatcctggccaacacggtgaaaccccatctctactaaaaatacaaaaaattagctgggcatggtggcgggcgcctgtagtcccagctatttgggaggctgaggcagaagaatggcatgaacccgggaggcagagctcgcagtgagccgagatcgcaccactgcactccagcctggtgacagagtgagactccgtctcaaaaacaaaaagaaagtgtggttcatagtagaatcccagtgttacaaagtgtcggtgcagatatcagctgctataattgtttctctacatcactttccctttcagggacatggaaacagtagtttgcctggctcattctaaagaagatctcagaatacttccttctaatgttagagagaaagagacttcctttacttcaagccctacctacttacaattggtttttatcattatcaccatccacagtgttgcaggctgcctgaaaaaaatctcctatcagacacttaaggccatttcacagcttcctcttcccaaaccacattgatagcactgggttatcatctgtcctttagagatttaagattcttaacttcttgtcaccagcagaggcatgactttagctattaagggataaatctgattatcacgattggaagaaaaagccagtacacctctgggacacattatggcatggatccttgggaaggcccaagtctgtttccccttcactttcttagagctgggcttctctcctaaagctgctgttgctgtgtgctcttgggactgttaccccaaccaagatcctaaaaaaaggcttagatgtgcctgtggttggggtgctctgcaaggcaccaaaaaaagaaacctgcagaaggctacataccatgaaggaaaaaaccacaagaatgtgggctacaggagagtatgatgtgaaaagcataaaccctagcgttacccggaatgctaaccacctcactaactaggaaatgggtttgcctgcctctgccacagtttcctcatttgtaaaatgaaaattacattgagaattctaacttacgtcataagtttgttggggattaaataagataatgcagtatggcacagtacctggcacacggtgacgtgcttaacaggggctgatattactattactattaagaatacatacctgctgctcactaagtgtacatatgatccctctgtgtgttcaaagtgcataattttagggaatttgttaacagtcatgccgacatagatacaaatatagagaacatatagtggcagaataaataagccaagatatgaaataatagtggggaactgtaaagaaatgataaaaataaggactcagcttaaacctttgaaagaaagggcctccataggcttgtcaaaccatagacttcaattttgaaaacctctgttctcttttacagtcgaaaagcaagaaacttcggcttgactaatgagtatggtcttggtgtggtccttcctttctggaggcctcagttttctctggaaactgggagaggtggagtagatggtctccaaggtagcttgtggtctaaaattctgtaagtctacttaaaaagaaaaggactcgtagcattcctcttttcgctgttgctcagcggtgtttgcctgaggtacagatgtttcgtggatctcccctggtacatttttctgtgaaatctcaggctcctgcctcatgtctctgtagcttagtaataactgaacatggttaatttgttctggtttattgttgattgggtgatttatgtcacgtggtatatgggttttttttgtttgtttgtttaattttcattcagcaaccagtggtcttggtcaaggtgggccatggccactctgcgactccaggtcgattcgtctgcctgttggcttttttgatttttgctttgaagtttccttttgcctcagtcagctgccttgaatgaaattatctgctgctgctctgggcttgtgatttcctttgctttcatgtttgctccctttctgaaagatgggggttgtaatttgtttgctgtttaggagccagcccttcagcttcctttcagtgatagcatcctgcctgccacactgggcttttctccttttccagtccggttgttcccaaaatcactagtttaattctctgtatttgaagaatgccaatgcaatatctccctttcctgaatcacaactgcagttggtaattgtggaatgcatttcctacaaatattaattttactttcaatatgtgacaggatgcagcgccttttttttttttttttttttttttgagacggagtttcactctgttgcccaggctggagtgcagtggcgcagctttggctcactgcaacctccacctcctgggttcaagcagttctcctgcctcagccccccaatagctgggattacaggcatgtgccaccacgcctggctaatttttttttgtatttagtagagatggggtttcaccatgttggtcaggctggtctcaaactcctgacctcaggtgatctgcctgccttggcctcccaaagtgctgggcttacaggtgtgagccaccacgcccagccacagagctgttttttataaatattcaaaacattttaaaagttaatagaaatacctctaatctggtcctagagagcttgtaaattgtctgacctggtcattctcctatctgcccttgggtactgtctccatgctcaggcactttcctatttaatatactacctgccaataactagctaaaagatatctttaaccttgaatcattagaaagatatcaaggttcttttcatgatgtatgctttttaaaaatttaaaactagcaattaggatacatttgaaaggaagactgtcttgatttcttggatattgtatagaacaacttgtatttgcacctctgagggcctttgatgaggtggccatttaatgaaacactcagctcaagtgttttcaaaacagctgatttactacacttggataccctgtggtgtgtagagttgtgcctgaagttgtcaaccaagcagcagagctggaacccagttgtagtgatcatgtctgaaggatgtctgctaaatatcatgtgctcgcttttggatagaaggaggtgggtcagagtgaagttgttaatcttcaatttttttcaaccacctctaattgagagtagaaaagcatttgctttctatcaatttgatagtcccatcttttctcctatatttgattatagaaagcagtttttatttttatgctttatctttattattttcccattgatttataagagaaatctttaagcatctatcatgtgcatctctgtaccatggatgatgggaagatatacaaagtaaagttcttgttagcaggaagatggactgagtatatgtatgactataaagtgatatcaaaagtacaggtgaagttgtggcaacattcaaaggaaagggaaatcagtttcctcttgaagttcaggagagatttcatggaagaggtatcattcaagctgagttttgttatatggaaataagaaaggaaagtcatcccaggcagggagaacagtgctcggaaaacagggtgtacatatggggacgagcaggtggtttggtttgcccatcagacagtgtggcaaggacagcaaaaggagatccagtctgagaaataagactatacagtgtagtcctttgaatactttgcagtgtttcatatacatctggagtcaactggtttgttgggatttgcatcttgcatccaccacttcttacttctgcaacctcgggcacattcctcatcatctctctacttcagtttcttggtccgtgaaaactaacaggtgaaatgaattctaagtatatgtttcatttaatgcagtaaatctaagatatcattatttcaagatttaatcaatataaaaatagactgaagtacttttagcacatttggcttcagcctagccatatttcaagtgctcagtagccacatgttgctagtggctaccatattgaactgcacagatctagaacatttggaacccattcttctgttctcctgtctttggttttatgcacacaaagagagaaacattaggattgaatgcaagccatttcatgttgataggcatagctaccacttacagatgttgctgagatgccagaagttaatccaaatacattttggtctcagttggccacaggagacttgtcagcagttacatagaatgaaagcaatcactgctagcaagtccatccttttggacatacaagtatcgctctgccttttttttttttttttaaagaaataagactcatctctcctttattctttcctgaccatgcctgcctttgtattcctgacagccttgaaaggacacagattatgtggtaaatataataatcaccccttttcacattagacgcagccctttgaattcccagcactgatctaattccaattgcttctgaagtttacctttcacacttgtgttggttttagccggtggatactatgtcaaaggtcatgaacttgtacacttcccctccaaagattcacagtatcagtgcccagtttgtcaagatctctctagattagtttatttaattttgctgcggttggttaattcacaaaatcataaggcctttttcttctttcaaatgcatagcaagtgagggacaaagaagaaggaaaaggaatggaattcagtttcctcaacatcttaattatctcagttttaagttcttctataagtgtgtctctgtggatgttgctttactgcttaaagcgtctaattgaaaccagatccttaaatctcttggaatcaagaagcagtagtaagcccagggcatattatccctacaatccagaaatacttaggtgtcttgtatttgatgcacgtgtaatcagtttactctcccagctcctttttctacctaaaatcttagtgatgtagtacagtggtaaaggggatatttattcctgttttaaaaggatacaaccaaggtagggaaggcttcgttattggtgattattcagaagacctattttctttacatatgctatggaaacaatactgttttccgctacagaatacagtttatgattatacttttgtaaattgcctgcttttcccctgtcatctgctaattccaatttgatactgttctgtgttcaaaaatacagcatgagcaagctgtaatggtgcctgtcgagagtcccagctgcttggggggctaaggtgggaggatcatttgagcccaggagtttgagtccagcctgggcaatatagcaagaccctagctctaaaaattaaaaaattcctaaaatatccactgaccataatagtgtctatcaaatgcattttcacattcttgttatgtccaaaattctctataaaaaattcaggaaataattgttttgtgatacctaattttcaggtaagcccagctggtctaaaaagattggcaatatttgaaacatttaaattatattaacagtttttcttttttgtatagttgaagaaagaattaagacatttcaaacttttgtatggagatctttgttaagtggattttatgcttgcttcttaaaatatattgaatacactttgctgtaggacagggcctagcccataataggcatgcagttcttattggaattgtgttgaacgactcactgctatgagcacccagtatttactagatcttagattttaagggttagaattttttcagggtgatcttttttgttcagatgcaaaatagctccagtactcatgtgtattttctgtattttttccttttttgccatcaaagctgagaaccttatctcttagaaacctttaattgactacctaatatgtgccagatacccatagctttacatgggatatctcatttaatcctcacagcagccatatgagattgctgttactgtatcacatttacgtattagggaactgagcttcagagagaaccacatttgttctgactgctgtcagtttgcctgcctatatcctataatatccctttcctttttaatttgttgcttctagtcctgaggaccagaaatccagataaataaaatatgctctggtgggccttcctgatgggaccctcgagggaggagaggatggagactgggagaggagttccaggttggggtgtatgaggtggttaactgtgtgcaacgcccctttcccataggttatggttactccatagttaagctgatgttacgcggttagccagaatgaactgattttggctagagccttttcttgtctaggaatggaggaattacctgaatgagttcccacagactgtcctagaggggccacagactgctctgagaagctagtgcaatttatgagtcctcttctgaaaaaaatgcagatactcatacatatacaatgtcgcatgtgctttcaggggtttcaggacccctctgaaatccatccctggatcccagattaaggtaattcatttggcctctgtgggtggatgttaatcactaatgctgttataacctaaacatgtccctaagaccagaaattataattaagaacagaggaactctagggactgtaagaagtttgaaacagaaaagggctttctttagcttttgggaggaatttgtgtttgcccatgaatgaagtgaaatgaccaggtagacagtagaaccaggcctgtgtgctggggagaccttctgtgccctaaggccacatggccgagagacaggtgggaagccaaggaagaataaattgggcataggtcctgttaatttacaccagcccatcaggttggagcacactcgggaaagttcttgctactccgaaggtgatttttagaatcagaaacctgtacttgagaaacataactttttgtgttatttatattttctgtaatgattttctgttgctctctgcttgattttatgtaaaatttgtactaaggttaaacattgaaagagaattttgcaaatatctgagcctctctaaagggaagaataggtgatgcagtggggttggcagcacttttcctattacttgggagtgaaccctcagggaaataaagtgcaaaggcttagccacaggtgtagccatagaatccctttccacctggagactgtcctttccaatttccagcacaggttttgcatctggttttcctaagaaggccccttcctttacacacattcctgcatactcctgcttcaccctcaaggcccagtagaaaccagcagtaggaccttcctcaattttcagcaagtaggactccttatttgaaggacaagtacctggctcttaattgaagtcttgaacagtttcaaagatgggaaaattctttattattttgctttgagattctcctaagccccagctgagaaattatgaaggcgactatagacacatcaaaatctattaccagaaaagttgccttaccaggaaaccgtaatttatagtgtatttttttaaggtgggaaggacacatgggtatggtgtattttaaaaggatttaaaagcactaaagtataggcacacctcattttactgcattttgcttgattgtgcttcacagatgatattgcattttttacaaattgaagatttgtggcaactgtgttaagtgtgtagacatcatttttctaacagcatgtgctcacttcgtgtctctgtgtcatactatggtaattgtcaccagctttcaaacttttgcattattattttatctgtggtcagtgatctttgacgttactattgtaatcgtttgggggcaccctcaagctatgcccatgtaaaacagcaaacttaataaatgttttgcgttctgactgctccactgaccagttgttcctccatctctctgcctttccgcaggtctcctgattccatgagccacaataatattgaaattgggccaattaatacccctacaatggcctctaagtgttcaagtgtaaaaaagaggttcgcctctcactttaaatcaaaagctagaaatgattaagcttagtgagaaaagcatgtcaaaagccacgacaggctgaaagctagtcctcttgcagcagttagccgagttgttaatgtaaaggaaaagttcttgaagggaattaaaagtgccactccagtgagcacagaagaaagtaaaacagccttgcttctgagatggagaaagttttagttgtctggatggcagataaaaccaaccacaacatttctcaaactgttggcctcaagcaatcctcttgcctcggcctcccaaagtgctgggattactgatgtgagccaccgcacctggccaccaccacattcctttaagccaaagcctaatccagagcaaggccctacctctttcaattctatgaagctgagagaggtgaggaagctacagaagaaaagtttgaagctaacagaggttggttcgtgaggttaaggaaagaagctatttgcataatataaaagggcaagatgaagcagcaagtgctgatggagaagctccagccagttatctagaagatctagccaagatcattgatgaaggtggctatgctaaacaacagatatcgatgtagacagaacagccttctattggaagaagatgccatctaggactttcatagctagagaggaggagtcagtgcctggcttcaaagcttcaattgaaggacaggctgatacacaatggcaattaaatgtcaacattcattttgaaggggatgctcaaactatagcacagaccaattttctttgtctaaatacaatagttttccttccaggcagcctcagtccacgttcatgagccacattcttgtgcttctccatttacatagctctaatagtagaggagagatgctttatgcatccctcttaccccgtctctagatatggagccacaaccttgcctgctaccagctgaaaattctcctgaagctaggcttttatcttcgaattataagatagtgttggctgggcgcgatggcttacgcctgtaatcccagcactttgggaggccaaggcgggcggttcacctgaggtcaggagttcaagaccagcctggccaatatagcaaaatctggtctctaccgaaaatacaaaaattagccgggcgtggtagcacgtgcctatagtcccagctactcaggaggctgagccaggagaattggttgaacccaggaggccgaggttgcagtgagctgagatcatgccactgcactccagcctgggtgacagagcgagactctgtctcaaaaaaaagtgtgtgtatacacacacacacacacacacacacacacacacatagtgttgatatgtgcatatatgtatactttgttttaatatgtaagctatttgtctgccaaattacttttttcataaaattttaagcaaaacagctctccgtggtccaccattatgtaccccccagaaacactacaataacataacattgatggaggttataaatttttttctcaacttttagatacgggggcacatgtgcaggtttattacatgggcatcttgcactcaggtagtgagcatagcgcccaataggtagtttttcaacccgtgccctgtctctccctccccctctagtagttcagagtatctattgttcccatgtttatgcccatgggtgctcaatgtttcactcccacttaaaagtgagaacatgtggtatttggttttctgtccctgcactaatttgcttaagataatggcctccagttccatccacgttactacaaaggacatgacttcattcttttattccatggtgtatatctagcacatttgctctatccaatctgctcgtagatgggcaccaaggttgattccatgtctttactattgtgaatagtgtggcagtgaacataggagtgcaggtatctttttggtataatgatctattttcctttggatatatatatacccataatgggattgctgggtcaaatggtagctctgttttaagttctttgagaactctccgaactgctttccacaacggctgaactagtttataacaacagtgtataagcattcccttttctctgcagcctcgccagcagctagtttttgcctttttttttttttttttttttctaagagataaggtctcactatgttccccaggctagtctcaaactcctggactcaagcaatcctcctcccaccttggcctcccaaagtgctgggattataggtgtgagctgctgtacctgacctgactttttaataatagccgttctgactggtgtgagattatatctgattgtggtttttgatttgcatttctcagatgagagtgatgatgagcattttttcatgtgtttgttggttgcttgtaggtcttgttttgagaagtgtctattcatgtcctttgcccattttttagtgtttttaattttttgcttgttgatttaagtttctgaaaatagattctggatattagatttttgtcagatgcatagtttgagaatattttctctcattctttaggttgcctgtttactctcttgatagtgtctttttattgctttatctccattttacagataagaaaccggttttagaagtttcagatatttgttcaaagtcataccatgaagtacaaagctgtttttaacccatacctttcttaagttccaaatccataatgcagaaaccatgctgggcattaaggaatcctaccttcaaaggaaatgacaaggctggagacagtggctcatacctgtaatcacatctgtaagcactttaggaggatgaggcaggaagacagcttgagcccaggaatttgagatcagcctgggcaacatagcaagacaccgtctctacaaaataattttaccattagccaggtgtggtgacacacacctgtagtcccagctactcagggggctgaagtgggaggatcatttgagcctgagagatcgaagctacagtgagccatgattgcaccactgcactcaagcctggaagagaccctgtctcaaaaaaaaaaaaaaaaaagaaagagaaagaaggaaacaaagaaagaaggaaaagaggcctgacacagtggctcatgcctgtaatcccagcactttgggaggccgaggggggtggatcacaaggtcaggagttcaagaccagcctggccaatacggtgaaaccccgtctgtactaaaaatacaaaaattagctaggcgtgatggtgggcacctgtaatcccagctactcgggagactgaggcaggagaatggcgtgaacccggaaggcagagcttgcagtgagccgagatcacaccactgcactccagcctgggtgacagtgaaagactccgaaaaaaaaaaaaaaaaaaaaagaaagagaaaaagaaatcaggagagtttaaaagcattccacaaagtcagtggttatatgttaatctgtgtagtgtgctttgtttcccagataatttagaagcaattaattctggatagacgtgtgttgcatgtaatgacagatactgattgtaatgttttattttggccaaaaaaaaggtggggggtggggagtaattttcctcaaaatcattatctggcagggtgggaggttgtttttcttttgtatacagagaaacagagtcccaggtaggaatatgtgttgtattcatggcagttcggcagacccttggaatataaccttcttcatggtccatgttctagtcctgctttgagaaccctcttttgagtaaagaaaatcttcaaaaacccatctctgggtttcatcctgaggatccaggaccggtgttctctttcttaagaggaaaaaaaatcacaatggtagaaaattctttgcaaatcctattgtagtcttgattgatctctcttctcattgctcttcgtcggcctcttcaacccttctgactgtgtgtattagaaataattattatcaccattaaaacaactttctttgtctatttcaattattttctttatgttaactattttctttttagagttgcttatctatttagcaggctactgcattagccttgagctagtattgtaagatgcaaaattatgttgccggcatcagttgggaatttcatggaatttgcttctatttgactatatttccagatggaaccatgtgccgaagtgtttgttttgggcctccatgaagtcattcctttgcagtgatctgtagctagactgcgctctcttgggactaacctgtgtgactaatttgagtaggagggtgataaactttgttaccacttaaaaaggggctaaaaatacttcttttttaaaaaactcctctccatattatctagcaacactctttgagggataatggaaaggaggtgataaagattagagctgattgggaaggttctgaatgcccaagtttcatttaggaagcttcacacctttgagccccagggaagagtttggaccccaggcttttacaggtttgtagtaaaatctgagctgcccagaacactctgtggctaatggcttttgcagaagtgattctacaactaaagatgccaatcaactaagcttgtattggttcatcgtccagatctaaaaatgattgttaatttgagttattgtgctaaatatttctaagaaatgcttctttttaagttgctgtcttgtgatcaaaacacagtaaatgaagggcttccctgaaaggtggagccagtagacttgatttggagatgaagcatataccgaacttgaagactggagaggtatttttgccttaaccctgtctctgattcactgagggaccttggataagtcacaatcttcctgtctcatgtttcttttacttaaaaatgaaagcatggattaggctagctcttcgtcaaacctcccttctcaattcaccttcctaagcacagaactctttttctaataaaattttatgcaggaccccaatctataaaacagatacaagaggagatgctttggttaatggagggcacagggagaatctctctctggcttcagttctggcccctgaggctctttcctgtctagttgagctttctttaagaggtcttccagctgtggcattccatccattattctaattaatgtgaattgagtattactaatatcaggtttggtttttttttttttcacttagtacccacatcatggagcaaaaaaagtggttctaaattgcagaatgatttaagctagtagagggtgccattcattgatattaaagattagtactggtctaaacatagcactattagaagttacagaaattcacaatagaaacccccttcctctgtcccagaatgcatggagcaagaatgcagaatggggaagtaaatgataaatctgcaaccattagtgctcactttctaagcttcccactgagtactaggatacagctctctcttcttccttcctctccttcctcaaatcctacattcctacaccattgctgagcaggttgcaattttggcctagagtgattactcctgattactcctgtccctctctctgactggagccaggtctgaagtactctgttttccacctgtcatctcagccaagaccttgcagattcaatactaaactgttgtataggattaaattctgagccttctaggaaaagtttcagaatgtgtttctttgctgttgttaattgcaaaatcaatagacctccctcccagggagaggagtttccttctcctttggtgggcttccctctagcaattcaggagctgctagaagcagattaacacctacagttccagaccagcttagagctcacttcatttcccactgtgcagcatttcaccaacccatggacctatagctagtcattcctgcctgtcctgcgccagggccttttccagccagcagtcttcccactgactgttagaactataccctctggctcaggctttttccagaaaaaaaaaaaaaaaaaaaaatcatagtactgcttcgcattttctctcaacttcacatttcctcacaaagcactaggctttgtcctaagcactttatttatttacttatttatttatttattgagacggagtctcgctctgtcacccagggaggagtgcagtggcatgatctcggctcactgcaacttccacctcctgggttcaagcaattctccttcctcagcctcccgagtagctgggactataggcgcacgccaccactcctggctaagttttgtattttagtagagacagggtttcaccacattggccgggctggtctcaaactcctgacctaagatgatccgcccacttcggtcttccaaagtgctgggattataggcgtgaaccaccacgcctggctgtctgccccccgcctgtcctaagcactttaaatgtgtcaactcatttggtctctttgaaaagagtggccaggtgaaggctgaaggaccggataagtgtagtttccagaatccttcttggctagttatagtctaagacttgcagacaggcagcctgggaagatctcaaacaagtaaccttcaatgaaaatgtacagttttgagaatttcgatatttgacagatgattgagccactcgagttgcttatgcatgaatgtgcttgtttagcaggtagagttattattctcttatgttcaaatttattaacaagggcttaatttcattccaaacagattgtgaggtgactacgtagtacagaagtacagtgaaatatgagattcctgagcctttagtggatgctgagctggagacccccgttagtgctacctctttctaaacagcgccagccatgaagcttttgaccttttcacctttaaactttgtttgaacttggaaagaagacttttgaattgtttaaaaaaaaaaaaaaggagaagaaggagaaagaaagacaagggaaaaaaatggttagggaggctgcaaaagagatgtggagactgggggaaaaggactgattatatgttagcttaacagtaatactaggaaaataatcctcctcttgtctaggagtttctgctactgggagccacagggtaatcagctcacatgacatacccagaggcgaatgctagcctgtgctgtttttgaacatactcaaacaaaggctgattatccaaacaagaatttggactgcagcagtcggaccagttaaattatagttagtaaaacttggtgccttgtgagcttggaatgttacaattgcagctggatcttcgtttgtcaggcagccttactgcacaataaaaccagagatttttatctccgcaggactcagtttaactccttgggtgcaaacagaaaagtgccagctatcatacgtcagaatcctggcaacatctgtccccactcctgtcagagttcatgaggcagtggcattttcgtggtgttctgtaggaaagtgggaggacaggggcaagttgctcttcttcttagatcttatgttggagataataatttttatttattcgttactttaacaacattttttgttttgagatggagtctcgctctgtcacccaggctggagtgcagcggtgtgatctcagctcactgcaacctctgcctcccaggttcaaccaattgtcctgcctcagcctcctgaatagctgggactataggcacccgccaccatgcctggctaatttttttgtatttttagtagagacggggtttcactgtgttagccagggtggtctcgatctcctgacctcgtgatccacccgcctcggcctcccaaagtgctgggattacaggcgtgagccaccgcatccggccactgtaacctttattaagtgttactatggacaaagccctgtgttagtactctacttatatacaaatggctataaaaagatggtataaagtagtcaattgtaaataggtttcaaaatgttgtaagtggagggatgatggagaaggtaaaaaaaaaaaaggctttttggagaaggtatgatttgagctgactttgtgggaaagtaggattgaatctttaaatgtggctctaaaagtggttttatgcagcaggaacaacacaaaggaaaaattggaggcaggaaagttggatcctggatgtgaagggaggtaataaaagagaagactgaaaaagtagaatagcctctgcatagcggacttaggatgccaggcctgagagtggacttcctttggtaaagcaagaggaagccattaaaaagttatcttttttacatagctgtcaaataataataagttaacatgtattgaaaggttaccatactgagaggtgaagccagctggacttctgggtagagtggggacttggagaacttttctgtcttacaagaggattgtaaaacacaccaatcagcactctgcagctagcaaggggattgtaacatgtaccaatcagcactctgtagctagcaaaggattgtaaaatgcaccaatcagcgctctgtaaagcacaccaatcagtgctctgtaaaatgccccaatcagtgctctgtaaaatgcaccaatcaggatcctaaaagtagccaatcgcaaggaggattgaaaaaagggcattctgataggacagaaacggaacatgggtggggacaaataaaggaataaaagctggccatccccgccagcagcggcaacccactgaggccccctagcaggctgtggaagctggttcttttgctcttcacaataaatcttgtggctgctcactgtttgggtccttgccacctttaagagctgtaacactcacctcgaaggtccgcagcttcattcttgaagtcagcaagaccctgaatccactggcaggaaccagctctggatacagtacgtgggacactgaatactcaaaataattctggaagaaaatagagactcagagaaacgaagtaactttcccaagactgctcagcccataagcagcagagtcacgattgaaatctggactgaccgtagacccccagctcttaactgctttttgtattactctctattccttttaaattggctgactttatgatcataatgcaaaatagattagccatatttttatatggaggcaggaagcttgactctaatggatcacccatattcctgaattggatgatgatggtaaagagaattgctttacaggggtgatttttatgttggagaagatacagttatgatcaccaccctgagttggtttaaatatacgggttataactttgtatgaacaagagttttgtttttgtttttgttttgtgagacagagtttcacttttgtcgcccaggctggagtacagaggcacaatcttggctcactgcaaactccacctcctgggttcaagcgattttcctacctcagcctcctgagtagctgggattacaggcacccgccaccacacctggcagtttttcgggttttttttttttgagatggagtttcgctcttgttgctcaggctggagcgcagtggcatgatcttggctcactgcaacctccgccttccagtttcaagcgattttcctgcctcaacctcctgagtagctgggattacaggcgcctgccaccacacctggctaatttttgtatttttagtagagatggggtttcaccacgttggccaggctggtctcgaactcctgacctcgtgatccacccgcctcagcctcccaaagtgctgggattacagttgtgagccaccacacccaggcacaagagtatttctgcttgaccaattccatcataatgagataatctgccctcatagctatttctgacagtgatttatggtagtgcagagctggctttggcaggtcttatgtctttatggccttgctttttctgagcgacacatttgctaccattggtgtatggctctccatttcccagtttccacggggtgtcttcaccgtattcttatcctctgctgaccctgctgctgtcttgttttctttcctgtcctctttgatatactctgttattgtaagccaggcttgtggcttctgggaggggtgattggcagggtcagtcagacataagcactgaaacgtgtgtcccagaggtggaagccaaatttcctctcagggccctgaggctaacctcctgtgatggcttcatggctagaaatagcaaaaatcgaaatggatattgcagatagtccagacaagcaaacagaagtccaaaatgcttgggtacctaagatttttttaatttgttcgtgtatatttttagcaatagaagcaatatagcatacctttgagccagtttttcctaggtgtgccaggtaggttggcattcacagttctcaggagacaatcaggtactgatttagtgagctcatttttgaaatgcaaaagcaaaaaggaataaaatagcaggttaccatagtatagatagtaggagttgattggcaccaacatctttatttagtttgggttagaacagattctctgcatatcagatttgaagagaagatcttagtttttatagcagtaccatcaaagatagttatatatccaagaggaaagcctgagtttgaaataatgattagctctacagattttcagctttttgttttggggttttttgttttgtttttaattcaatttgcaaagcctctagcagatagttctgaaacctttgtgaacgctttctgtaacttatgaagcttttggaaatttggtctagtgatgagtaattctttctttctgacgttaatcatttgcattttatcagtggctccaagattaatataaaaagagaacttcatttactctgagtgatcatgtttcaatgtgttaatgttttaggagtagcagaggataacatgcaactgttaagatctagatcatgctaaaagtattaaagttggctttcagagattagttttttcctacttaaaattaagaacttaaagattttaatcaagataatcctaaaatgtcttaaggtgcaacttattctggagttgataccagttggaatagtaaagaccaaaggagaaattgtgagttaatgtttacttttttattactattttaatcaaatggctttacaacttgaccttttaaatgtgaatatatttttttaaaagaacactcaggtatgtgaagccataattgttgtgttggaagttctcagccctaaaagttctgcacttgaatgttaaatatatgtgtgataaaaatattttgattggggttttctgtgtgggcatttacattctcctggtgacaggtgttttggtgaagagaaaagcatcttgtagatgtttgagatctgtaaccatgctgtctcaacagcagcagcagcagcagcaggaggaggagctaccatttattgaatgcctgctctatcataggcactcctctaggcactctacagacataatttcttctacttacaaccatcctggcgggtagaatagtatttttatttcacagattcaaaaacagcctaagagaagataagtggtagggacaggctttgaactcaggtttctctgattccaaggtccatattcttttcactataccatgatattaaaaaggaacaagtggggccaagcacagtgggtcacacctgtaaccccagcactttgggaggctaaggcgggtggatcacttgaggccaggagtttgagaccagcctggccaacatggtgaaaccccatctctactaaaaatacaaaaaaaaatagccaggcgtggtggcgcacgcctgtaatcccagctactctggaggctgaggcaggagaatcgcttgaactcaggaagcagaggttgcagtgagctgagattgtgccactgcactccagcctaggcaacagagactccatctcaataaataaataataaaaaggaacaagtgtagctgacatttatctgagacttatcagccttagcacacatacactaaaaagtttaaaacagattttatgttattcactagaacagattcatttacctatatcattgagccctataactaaagggtccatttcttttaaattgatctcagacacacagaagtatatcttaactaaaactttcttcccgaaaagaagcatttttaaaaggtaccaagggctgttattcttagaatgatttgatgaaatcaaagacaaaaatagtttaggcttttgattagatttcaatatgccactcttactggggagctttctcttgtttgggcatgacaggatttttgccatgagaaaccttctagagcttccgccccctcagttctcactctccatcacttacccttcaaaagactctgaatagcaattacaatacagttaagctttctttgggggaccctcatatagtgggcacactgaatatgtggatttaatattagaggcttgactatttgaatgtgattgcaaaagtcagtgaggactctgttattactacgaatttgtaggttggtatttagcttagcaagtgatgaagctagtgagtgagcctgtttaccaccaagtacccacgtcttcctttggctctgttgtcctctgcttgtttcatcttgtgacttaaaacacacacaccttagccaactgtttatgctaatgatgaaagagaagtcaaagtaaataagcttaataaaataatagtttgggcctgcgcagtggctcacccctgtaatcccaacactttgggaggccgaggcaggcggatcacgaggtcaggagatcaagaccatcctcgctaacacggtgaaaccccacctctactaaaaaaaaattacaaaaaaaaattagccggccgtggtggcgggtgcctgtagtcccagctactcgggaggatgaggcaggaaaatggcgtgaacccaggagccagagcttgcagtgagccgagatcgtgccagtgcactccagcctgggcaacagagggagactccatctcaaaaaataataataagaataatagtttggaggtaaaatgagtctaaaaaatgtacttacctattttttctctactaacatcatttaacatgtaaaataaaattttgttgaataaatgttaaatgtttctgagaaatctgagagctttcataatagtataatattcaggttttttcttgtttgtttgttgtttactaaagaggaatcatttctcagtgttaagtatatctgggaccagaaatggctcttgttatccaaggtaaagaatccaaacattggctgggtgtggtggctcacacctgtaattccagcactttgggaggccgaggcgggcagatcacctgaggttgggaattcgaaaccagcctgaccaacatggagaaaccccgtctctactaaaaatacaaaattaactgggcgtggtggcgcatgccagtaatcccagctactcaggaggctgaggcaagagaattgcttgaacctggaaggtggaggttgcagtgagccaggattgcaccattgcactccatcctgggcagcaaatgtgaaactctgtctcaaaaaaaaaaaaaaaaaatccaaacatcaggaagacagtgtaaatatcagggtctgacctaaaggagaccttgagatgtgtgctggttagccctttgacaagtctcacagtaccttaaaacacatatttatagtgaggtttgagtaacttggaagtctattttagaccaaatacacgtttggttaatgttgctaggcatagagtgtagccctcctcccttcatatgagatcctttagacgtgacaagacccgcctgtgatgcctagacccttctcccatttagaaggacatcactgaatgcaaatttgcaaaaagctatggcagaacctgtggttaaaatctcataagattcaaagagtctggaatttaagaagctaagggaaaatatatgtccagagcctatcttctaccagtcagccttgtttttgcttacataagtttattctttttctgagccaatgttgaattgaagtaatagtgatcacagcttatcacagttctctaaagattattgcctccttcactgccttcatgaattaacaccaatttcttccaaatggaattctttaaaaaaaaacaaaaaaacccaaaaaactttattgagatatgattgacatacaaaaagctatacactttttttttttttgagacggagtcttgctctgtcaccatgtcaccaggttggagtgcaatggtgcgatctcggctcactgcaacctctgcctcttgggttcaagcaattctcctgcctcagcctcccaagtagctgggactacaggcgcgcaccaccacacccatctaatttttgtatttttagtagagatggggtttcaccatgttggccaagatggcctccatctcctgacctcgtgatccgcccgccacggcctcccaaagtgctgggattacaggcatgagccactgcgccctactgctatacacatttaatgtctacactgtgatgagtatggagatacgtatatacctatccatcacctccaaaagttacctgctgctctggcagaatctctttcttatttaaagctgagtaatattccattgtgtctatatactatattttctttatccattcattcatggatggacatttagtttgcttctacatcttgactattgtgcataatgctacagtgaacgttccatacagtgaagtggagatacctcttcgagatccacatttcagttccttttgatatatacacccagcagtgggactgctgggtcatatggtggttttatttttaattttttgaggaatgtcataagtgtgtctcaagaaaatataaagacagtataagaagacttagaattgagtacagtttgattgaatcaagggtaatcaccattatcctgattttcaggactttcattcacttccttcatgtagcacagttccctgccagaaatatccatcatggacgaagtgactgctagagacttcagggaaaataataacttataactattttatgtagttgagggatgagtgttttggttctttcctaaagagttggaatctgctctgtcaaccaggctggagtgcgctggtatgaccataggtctctgcagcctcaaactcctaggctcaagcagccctcccacctgggcctcccaagtagctgggaatatcagtgtgcactaccacaacctgctaattttttaagttttttttttcaagagacagagtcttgctatgttgccccagctggtcctgaactcctggcctcaagtgattctccctgtctcagcctcccaaagggatgagttttaatatgctaattacttcaagttttaaaagaataatatgtcaaattaaagcatttttaaacctctttttttaactcaagtaatacatatttattatttaaaaagcttaagaaaaaacagaagaaaaaagaaaactaaaatcacttgtaatttccttacctacagttaacaactattaacattatggtatttattaagattcttctatgcatttgtatacacacatatatacgctattgtttgtaaaatgaaatcacactgagcttatttaccattaggtaatgagtcttacctgtccagtaatgaatgtgttttcctttgcttttttacttagcactatattgtgaatatcatgaacaaagacagtttggaaacagggtgactagaagtcaacaaaaatatgtgttacaaaagaataacaataggtaaaattcagagtattattttaatttactgttaaaattacccaaatctcacatactttattcagtctatatttttaaaaattggatatataggcccggcgcggtggctcatgcctgtaatcccagcactttgggaggccaaagcgggcggatcacgaggtcaggagatcgagaccatcctggctaacacggtgaaacttcatctctactaaaaatacaaaaaattagcagggcgtggtggtgggcacctgtagtcccagttacttgggagaatgaggcaggagaatggcatgaacccaggaggcagagcttgcagtgagccgagatcgcgccactgtaccccagcctgagcaacagagtgagactccgtctcaaaaaaaataaataaataaaaaaggatatatagggaaggagcaattttttaaagatttaactgcaattgcatagtattttgtgatttcattattcatctttctaaatgtggtgtaatagactataattttagtaagtgtatcagtccattctcacgctgctgtaaggacatagccgagactgggtaatttataaaggaaagaggtttaatggactcactgttctgcatggctggggaggcctcaggaaacttaaaatcgtggcggaaggggaagcaaacacgtccttcttcacgtggttgcagagagaagaatgagtgcccagtgaagggggaagccccttagaaaaccatcagatctcgtgagaaccaactcactaaaacaagaacaggatggggaaactgcccccatgattcaattatctccacctggtccctcccaggacacatggggattatgggaactacaagtcaagatgagatttgggtggagacacagccaaacgatatcagtaagtatttatttttatttattttttagagacagggtcttgttatgttgccaaggctggattcaactcctgggctcaagtgatcctctcacctcagccccccgagaagctggtactacaggcatgtactaccacactcggcttaattttaggaagtatttaagcaaatattattgagctgtataaaactgttcattttaaaaagtgaaaagttgtttccaaacaatgtgtcaattagtttttctctttggtagaaaaattgtatatgttcaaatcaaagttgtagaagtacctccctgcctaacattcaagtggtttcagatggtaggctttaacataacaagatgagctattgggctctcagaaaaagcagttcctaagggagcacctacatttagtacttctttttcatgttaatgaagttctgtctcattgaaagaaaaaaaaagagattgttgttgagtggaggtacctactgcctagtgcaaggtcaggaaggctgtggagctgatgggcagctcttcagaatccaggggtccattattggtgcactcagcgtgaggctgaagctggaaggtcacctcccctaacgtgaataaaactgaagctgtgagagctcaggtgatccacccagggttccacagtgattgggagggctgagactttagaattctgccttctaacacccagatttggcctacctcacacactgacaggaattctcttctatcctgggagagtcttacaactatcacgacctcataactgatctaagatggctttctggagatggtcaagtcaggaatagcttttaaataggttgctatggccgggtacagtggctcacgcttgtaatcccagcactttgggaggctgaggcaggcagatggcttgagtccaggagttcaagaccagcctgggcaacatgacgaaaccccatctctacaaaaaatacaaaaattagccagtcatggtggcatgtgcctgtagtcccagctattgaggaggctgaggcgagaggaccacagaagcagaggttgctaagactcgagatggtgccactgcacaccagcctgggtaacagagcaagactgtctcagaaaaaaaaaaaaaaaaaaaaaaaaaagatttatgttgtttcccccagtcccctaggtctctccttttacttccgcaaccaaccagaagtcaatgtaggagccttggtgttaggtgtaggctaggggtggcacctgacacggcatcactggagcctgtgtactggaattagaccagttgctacaagttagctctgttggttgtcaagagaatttccttttctttattaaaatgcaagtcatgcttttgttttaatacaatatcaaccattcagccttgacatgatttaaaatgaatatgggtagttttgcctttgagtgagagtgtgtgtgtgtgtgtgtgtgtgtgtgtgtgtgtgtgtatgtgtgtgataacctaattgacaaagcaatcatgatgttttccatgagcctgatgttatcccatcattcggagacccattttgtttaatttgttttttcatatagtttctggtgggaaaaatgcattgctttagtaccgaaattaacttgattgaaatgtcttagactttatcattttccagtggctcaaagggttatttcccaagtgtttaattttttaagtacagtgtatattaatttcactgctactttctgacattcatcattccatgagaaattatcacagatgaatacatcagacttttatttacactccaattcctactcaatgtaaagttatttaactttgacgatagcatgcaaatttgataaagatgaggtttttaaaaacctgaaccatttattgatttgctaagtataattttcacatttttcttatagtattctataatacatctttcagaaggaaaacacttgaaaactagtataatcttcaggaaccgttcaatcagaaataatgagtggagaggtcacttatcaaaaatatattgtttaaaatacttatatttaagtatttctagtctttgaggtaaaaagttctgccacaaaaagtatggattcattgggcttctgaattctgtacatgtcacgatttttgctcttgggctaaagatagaaagtaaaataaaatgttctttgtccatttagttatccttgactccatgaaattctccaaagtaattactggtgaccacaataccacctaccagcaagagcagcattgaccatgtgccaagtcccttattgccgaccacagctgctcttgactacagcagatgtttcttcttttgacttggcagtaaaattttattaagcagttttgcaagtagagagcagcatactctacctgatgagtggctggagatcttagcccttttgtgcaatcagcttagttttctcctatctaccatcaggcccccgcctctaggttccttggatctcaccaaccaggcctcaggccttgtaaactgcagtcctcttgggtttgcttccctacccacccatgtaattttcccaaagaaaataatgttagaagagcagccgcacttgtggttacaacttgcggcattgaaaggctgtcacattggaactttgttcctaccagttgtgggtttacaaaaaggagttggggtactttgttgggatgttttgttaggatgcttttctgaatttttccacatctctttggtttggatgttgacttggaaatctcttttgaattagcttcttttggagagctttctgcttttctgagcacttcttggatcctttccccaacaaagccaccaagggaacttcttctgatcctatctcttttgtaggtggtaccctatttgagtccttctgaagactggagcacataaaggcctgattttttcttctgagttggattggatggtttaacataatttgtctctatgttttctgtcttgggtaaaggaatatatttgtgaattgtggctgatactactttaaaaaattccaaaaagaaaatctaaaggaccattcctatgattattgcaacccatttctcaggtctttcaaagaaaacaactcgtaaagatactggcagttgaaggtctaagtcccagcctggcatgaattcccagagagccttgggccttgggaggaggggtaatatacaagattagagtgcaaagtccatctggtgagaatttgtctggtttgtgcttcctcagcagggaggaagtagcagtgacctcagtcctgaatggttatttcagaagtgtatcatggtgggaatttagccagctttgtggcagatgaccaaccctgatagcctgatttttaaggcccctaacacaaatgataccaggacttctttgaatattctatttagtctgtactaggacacataggacaagatgagcgactattttagacctgtaggtcaagaggtttgaagcagtatattcaccttttacacttcaaaccacttggagtatcttaaagaagtagtatactgtcaaatacttataaaacttccttcttctttgctcttaaagataagacgttgtttagatgaatatatattcttttcctgtgtattctactattcctgcaaaaatttgtttttaaaataagaaacttggctgggcttggtggctcacgcctgtaatcccagaactttgggaggccgaggcaggtagatcccctgaggtgaggagtttgagaccagcctggccaacatggtgaaaccccatctctactaaaaatacaaaaaattagccgggaatggtggcgggtgcctgtaatcccagctactcgggaggctgaggcaggagaatcacttgaacccaggaggcagaggctgcagtgagccgagatcacaccactgcactccagcctgggcaacaagagtgaaactccatctcaaaaataaataaataaaataaaatagaaacttgaaaataataccagcactgctagagtgggtatttggctcagttcaggcctgtgcctttttttgatgttcccagagcagagcactccttaaactaggatgagaaaagttaattttaatcctccaaaggcttatttgctagcacaaaaggtcatgaaacacacccaaaactatattgctaaaatctgaaggagagagatctcaacagcagagatggactctagtgtcccaacatagaattgtgtctctggctgaagaaatagtttgttttaggaacgccaatacaaaagctacagaatggaagagttttcccttaactgatctaagggaaaattctttttctcgtgttgttttaggaagctcagaattatttagaaatacttgtgaaatcatggtcacaggagttatttccaaggatgtttaagtagctgctctctgcccattattttgataattactacaccttaatctgttatctgtcaaaagggaaaaaactttctgttatctacctgatagacccatggaatacaaaaaaaatgtgatgacccaatcacatttaaagcttttaaagctcccttttgagatgatttcttagggtactaaaatatcacctgccccagagtttacaaatcagaaattgaatgaggcaggcttaaagaggatcagaaaacaagataccaaataagagcagccattgtaaaactagagaaggttacgaaatggccctgcttttctataaggaaggtcgaagacaccaggccccttgccctgggtttgtctggtggaagtttaaggaaagttcataccctgggcccagtagagagctttgccttcataattgtctgcatatgatttgacaaacataagacctcagtgttcctagatcgtttatccccctcagcaatgtgctaaatatgaagtaaaaggttaccaaagggaggatagggaagaaaacctaattaccaatcctggtaattttaaacatgagaagatttataaacaacggcttcttcatacacttgtgagttctgacatgttgtgaaaataggacctgctaagccattgaaaggattttcaatatattgtacgagatggaaagaggacccagagaaggcttgtttttcattttaaagagttgctttagaaaccaaggttgtaactgagcactgctctgtgctgtatcaagccgtaatatccagtgagtcatgaaggcattagggaagcactggagacatcataagaaacatttgagttaatgtttgagataaggaagatgattatctctaaaaagaaactgaaattaaggggcacagtctcccgttttcggacagctaaaaggcattcttttcagtgatctctcctttactaacccatgtacatgctgtgagtatgtgacctagaaaccaggcttttttaagctgagctctggatacttgtagactgagaccttgggcgagttactgcccaccttggcttcagcttcctcacctgaaaacgagtgatcaaccaggtaatctttatggggcccttctggcccaaggactctatcagtctggtttttgaacattatcctacattagacaatctcagaaaggttttatgacttgtgggtgcctttgtggtacttcacatgagcgggaggtcttaagactatggaccccttgggagaccagtgtctaattctactacttcctcctccccaagaattcagatggtgaaacaccctcatccctccagccctgcccccaggaaacccttcattcagaaaggtcatttcatttcctgtgagccagtcttacatcactggtgcaagaattgggcagtgcttgcccagctggaaggtgagacattggaggcctcagcctggtgtcccagacagtatttgtcaggctgatgataagctggtggagagtctgttaactcaaggcctgattctaatgaatttgggattccttgctgaaaaaaagactgggctgggtgtggtggctcatgcctgtaatcccagcactctgggaggctgaggcgggcggatcacctgaggtcagagtttgagaccatcctggccaatatggcgaaaccccgtctctactaaaaatacaaaaaattagccgggcctggtggcgggcgcctataatcccaactactagggaggctgaggcaggagaatcacttgaacgcgggatgcagaggttgcagtgagccgagattgcgccattccactccagcctgggcaacaagagcgaaactccacctcaaaaaaaaaaaaaagaaaagaaagactggatcctggtccatccaagatgctgcccttgagacctctgggttgatgactgatatgttggtctcttgggacaaggctgtacagttgagaaaagtagcaagaacatcagatctctgcagataatctggcccccataaaaaagcaatagcaactgggaaaaggctagactgctaggttcccagctatactggattattagacaaagctacccactccatctttgtttatagaactcattttcaggaacaagtgttttatagtgaggtggaggttgtaaagaagctctttataatgaagatcccaaatatgtgagccttctatcaagcttgatctcaaggaactttacacgggtggcagtttagaagaaaaagagagaaaaggataaagaaaaaaactaataaaaatagctgagatcactcaacagttatcaagaaacagatactacagttttataacacgaagtactaaaagtatatgcactcttaaaaggcaattaaaacgtatgctccaaaactataaaacattttcttttcatctgcaacatagagggcagattacaacacattaataacgttttgtttagagttcagtttctgatggtttccaaatgtagtctgtgtagattaaccagaaggagtccagttctcttttttaagagcgcttgtaaaggaaagcaatgtggtaagattgttatgaaaagagagtgtatttaggaaatagcacttagcagggtctctctgaatggctgccaggtcaggaagctgaagtgcaaggcttggcccttgttcagcccccccagttccagcttcttgaccacacagtacgtcaagaacatgtcacaagccagccaggaagactcagccccgcccatgggccagcttggcacggctgctttcacataacccagggctccagaggggccggaggcaggcattccagggccacgggaacatgcaagtttttaaaatagaagtgaaggacttaaaaaaaaaaaaagcctgggaattaaacagttgctgagtccttgagtccttatggaacatggttcctcatgtagagtggcagaggtgaaaagggccttaaaggttatctcatcctctgccctctgcttatagacaaggacattgacctgcttacaaccatagtgatagaaccaattgtggaatccatatctgtcagctcttagtctgctaaacacactggcttctacctcactgggctaagctgccctttcttccttggattttgactctagaaagctgtccagtaatctgttcctatacattttttttttttttttgagatggagtcttactctgttgcccaggctggagtgcagtggtgtgatctcagctcactgcaacctccacctcctgggttccagctattctcctgcctcagcctcctaagtagctgggatcacaggcatgtgctaccatgcctaattttgtattttgtagtagggatggggttccaccatgttgaccaggctggtctcgaactcctgacctcaggtgatccacttgcctcggcctcccaaaggcctgggattacaggcatgagccactgagcccggcccgttgctataccatttgttcctactacttgcctaactgttctatgtctcagtctcagtttccttgtctacaaaatggagataatatcaatgcctgggctgggcccggtggctcacgcctgtaatcccaacactttgggaggccgaggcaggcggatcacctgaggtcaggagttggagagaatatatatatatataatcaatgtctgcttcacagagttacaaggattgatagaataaacatgtgtaacatttacagtgcctggtatggaataagggctcaataatgttatctattcccattaataatagtattattagcattatactatcatctgtcttattgctactactatttctacagttgctacatcagcagtcccaggaacttggcctacggcctaggcatggcgtatgagctctatggtagtagaaggtcagacccaggattggaggaggggcagctgagtagaggggaagatgaatctcggatgcctctgggccagtgcttcataaagtcctgtgctcagattccagctgtggaacagaggtgcagaggtggattttaatgttattgttgtttttgctttgttttgcctttccatttttgttgtatagttttagttgaaagagactttagagatgattaagtatacattacagttcggcctccacggtttacatgggggaaaactgaagcgcagaaagaaaaagtgacttgccttatgtcttgctagccttacttggtaattgagtagagctctcttgtctaatttacatataaaaggaaaactggagaagaaagagccttaggataatactcataagatctaaaattcctttagcctttcttctacatcaggcccactgggaccctacttaaaaccctcattttgacctggttcctcagtcagcatggagacaagcccgaggaaaaaactcaagagagccggcctccttccttaggtattattagagagcaatcccctataaaagttaagtggatgtttgttttttatttaaaaccttcaggagatttaaccctgctgggctgctcctgcctcacccacagcagtgtcccttcaggcctcacagaacacttctgccgtaaagagggcttgctttcagaatgcttaaacaactctgacatgcacatttctttgcttaatacaaggctcactgatttagaaggtaaaattactttcttagttgatgcctcaattgttttttcctttgagttcttatctctcctttgccctagtgtcaagtcagttttcctgttttgctaaaatgtttgatcaactttaagattagaaaatttatggcggggcgcggtggctcacgcctgtaatcctggcactttgggaggccgtggcgggcggatcacagggtcaagagatggagaccagcctggccaacatggtgaaaccccttctctactaaaaatacaaaaattagctgggcgtggtggtgggcgcctgtagtcccagctactcaggaggctgaggtaagagaatcacttgaacctgggaggtggaggttgcagtgagccgagattgcgccactgcactccagcctggtgacagagtgagactccgtctcagaaaaaaaaaaaaggattagaaaatttatactgctttaaatacccagtgagtatagtatatgattgctggaaaagtcgttcatcctgaccaagaacaatacaataacaacaaaaccattacctggaaaaaccaactagaaattcagtgagaacattttagctttttccttttaaatttttaaaattctgacattgcctggttacattgaaacagccctgttgtgtcatcctactttctttttcctggtattttcctctttgggactttggtttcattaatctcaatttgttctgaaggcactaaggcagattttcaaagagctgtaattgtcacagggagagcacaatgacttattgaagtttcacatgttgctctttttggaactaccagagattggaaccaattctccatccacatctctatccgagagttaagttttctcttctctggtgcttgtcaaaagtatttctcccagctaatctcattcccagttgccaaagaaaagatctcaagcataactcctcatctccaggtcacccgacaaggtaagaagagagattaaatgaatgtgcccaagtttctttcccttacagcctccagatctccagaatataccttctttagtttccacatcacactttcctacatttcttcttaatttgatgatgtcttgagagtatctcaggaaactggtatgactaccaaggggacagaggcttttgtagcgcatcaatacccctaagtctatccatccttctccagaaacacagtgggcacatctttgcaccctgtggaatcaatgttagtgctgaaatcagagtagacttggctttgtacttttgtctgggtagttggcttaagtgccgtgtctgtattgagtgacacttctccatcagaattcttattcttttggaagcctagactatttcttcatttgaccacactgtgcagggttttagtgctaaagggttccggatgtagctgctcttgtggagaaccttatcacagctttcttttccctaagttatttgtggtaaagtcctggcagtttgtttagatgttcagtgagtgacacctaattgaagaagtggctggggctggacttcaaggtggatggttttcttaccaagtactatgaagagatttgctcctagactttagagatgggaaatgctgctctcttttcccctgaaaattgagtctcgtcaaactgacaagttattttctgaaactccgagtcataattgtaccatatttattttctgattttttttaacctttcagttaataaatgttttccagcctccatcagcctctactggtaatcaggagaaatgggccaatggctttatgtaactgaggtttctgttttaacatgaaagtactatatttaccttcaaaatgaccctcacttagatcagactacctggggttgtcaagccttccatcttcaagccaagaggtagtttggtttttgtttgtttgtttgtttgtttgtttgtttttcatttatttttatttattttattttatttttattttttgaggcagagtttcactctctcgcccaggctggagtgcagcggtgtgatcaaggctcactgcaacctccgcctctggggttcaagtgattctcctgtctcagcctcctgagtagctgggattacaggcgtgggccaccatacctggctaatttttgtatttttagtagagacagggttttgccatgtttgccaggccggtctcaaactcctggcctcaagtgatccacccacctgggcctcccaaagtgctgggattacaggcgtgagccaccgcgcctggccgtttggttttgtttaggtgtctttgtccatggagtgctatgtgtccagggttgttgcccacttcctgcctttgaaaccagtgaattgtgtcaccagagagccttggatacagagataaactggagacagagtaacacaaaaataatcatttcaaaagaaacctgaggctttcagggttgttggtatgccatggcacaaggacccaaagtgatcttctcaggcctcaaccccagcccatgcagatggtatttgagccacttacaagaaaaggtgaaccttagtactgcatataaataagtctctgagtaattccttggaggtgaacctaggttctctttgaggtattttctctaccaaaatcaagatttttggatttaaaaaaaaatttacattatgctttttatttacacagcatttccgctcacatgatttccatttagatctcaatctttgcgatcggtgttgtcatgtccattttgctgataaggcttagggaaagaaactctaaaatcacattgctaataaagggcagaactggccaggcgtggtggctcacgcctgtaaccccagcactttgggaggccgaggcaggcagatcacgaggtcaggagtttgagaccagcctggccaatatggtgaaaccccatctctactaataatacaaaaattagctgggtgtggtggccacacgcctgtagtcccagctacgcaggaggctaaggcagaagaatcgcgtgaacctgggaggcggaggttgcagtgagccttgatcacaccactgcactccaacctgggagacagagcgagactccatctcaaaaaaaaaaaaaaaaaaaaaaaggcagaattctggcattccacccatgtcttcagtcgtttcttcaagaatacttttaccaagccaccttcctttgaatggaatactttagcggtcccaagaaagtcttcctttatatcaaaatagcaaatattttggtcatgttaaaatacttttcttctcaagaactttgatgtgctgcatcttcaaataatagaaatcttaattcattattgtcttgtttaaggtaacattatgtagagggaggaacacggaatttgggatcaatcaaataattcaaaatatgattcttctctgtgataaatgtgtgacttacacttagcttgtttcttcatctagacaaatgtgaatggtaaaccagctcaaaggggtcttgcaagtattaaatgcagtgacacaaacacagtgcttaatagtagtaggaatccataaacagacatttcccttcccattttcactctggttcaaactgatcttttctttcttacctcccacttctttcttagatcaattctttgctcatgggaaatgtaattgttaatcctctcttgagcatagattttctcttcccaccttattatttttgtgcacactgttccttcctctgaagagccctgctcttctcagtgtccttcatacactcctggttaaccacctacaggatttctactcacctttcaaggtttagagaaaatagcgctcttccttgcaacctttctgattattccagtcaaaaattgtcttcttttctctgaatatctttgtctttaatagtcattgccctcttatgggacttaccatgtttcgcctgatgttgtctttaagtatgtaactttattttctttcctatcagactttaaattcattgtggaaaggggttgttacttcgtgcctttagatatccaccataatgtgtagcgtagttcctaggaggctgcatggtatgatcaaaagaacacaggtttttagaggcaggtttatctaggtttgagttgtgggtctgccacttcttcactagctgttgaccttagaaaagttgcttcaccctctgagcctctgtaaaatgtgaataatcatacctacttcatggtatcgttgtgtggattaaatgaaattgcatgtaaagtgcctggcacaaaacaggcgcttaataaatgttagactgttccccttgatcataatacaacattgattaagtaagtagactgatgttcactccttattgcatgattttctaaagtggagaattttggataataaattttagtagactcatttgatataacagggactggtatacaccctctgtagttgatttgggaagccaggcatcactctgtggaagaaccacagaacactagctaaatattgacaactgactatgccgtcttattccagcatatggatttgtattcgtaattccccaagataagattttaccgtccctcttaattttattaatccattctaaactgacagatgttgcagtgagctttgagctcttggggattcttgttttgtttctgattaaaagatgagtttccttcttaaacccaagggtctaagtatcagtgcccttctctcctaaacatcttgcttaaatgccagaagtaaacttgttattctctattggatgctaaagaagcttttcactgtctaagccccttctaaacatgtttccttctaggaggcagaagagtgggaattgtttagcatagtacctggtacttggtagctgcttagtaaacagtagttagtatcatcattacttgtatttacatttttattttgaaagagcatggggagtgtaagcagagctcacagaactaatctgtgttgatctgtcttcttcttgagggcacacagaatttgagaacactgaaattcagccagatagtgacccagggttatggtcagggttccagtatggtttgtgcttttgttccttcttggagtccagctctgactttaatagcacagtaactgccagttcctgtccataggggttgagaacatcgttggatgatatgtttaatgctgcagatgctgaggttgtctaagtcgtggtctcttcttaggttactggctggtatgtgaactgctactccagaaagcaagttggtcaacagaagaattttaatgaagccatttaagtgttccagccactggagctggttctctttgttgttctttttttccccttccatcaacctactttcaagaagaggctcatgttctggttccagggcaccagccttagagtgggcagtcgttcattactggcctaggacaatcatattggagatctccctggacatcagacacttgctatcatttctgttctcttgttggctgatcctcctagtgcttttaggggcacctgaggtcactttttgccataaggcatgtcactctgtggcatcttactgaataggatatgctttttattactttggactgacctagtgataataatactaatagccactatttattgaattgctgtgtgaggtaggcgttgtacaggctgcctaacatagttttttattaatcctcacaacagtcctttaaggtaggcattaaggtaggtattcttatgcccatgttacagataagtactggataagttaaataacttgccgaaggtttaaacagctactaaatgccgaagtcaagacttaacttcaaagccctgtttccactttatttacagaaagctcaaaatgcccctgaaactctgaaatcactgtggtatttcacactaacttaccagaaattcccaggacattaattcagggatctgagtttagtgtgtagagcattacccaatatgaaaacagtggagttccacagttttatgagaaaacccagagaaacccatagtacgttagacaaattggaattgaaacgcttaagtaaaaaaatattcattttaaggtcatctgtttatactgacacaaggtctatagaaaatgagagagttggcatcatgtttctgaaatatgcaattttacaatgggaacgtgttataaaatgccctgccactgttgttttccttgggatttagagtgagagacatgaaggctgacaactctcttcctgttgtaggtcagagcttcaaggaactctgtaatcttcccaccagctttattctctcctgaaactcacgggtaaaattagatgctggctggacgtcagtagttgagtttgaaagctttcagaggccaagtcagacaactgcagcagactgctttctcacagtaccagtttgagagacactttgtaccgactaacatagtttagtaaaccgatgagtgtctggcaattttgccgtaaaacgccattaataacaacgcctataggagcagaagaaaatgatctttgtgtggttaatcttggaaacaggatcaggctttatcttccttttaccaatatgctgcctttacctcttgatgttgctctactctagtgtactgttacagttgaaaagcaacaactctagatgaggatttagttggaactattttattatatgcattataattgactctaggaggcagacatggtgaaaagggtgtgggaagaaattatttaaagggtgaatgctctcccaaactatcatcaaacgcatttatctaatttgacacattttgcctggaagtcatagaagaagactgaggtgcccccatcagaatataaagagtcagaaacttaaaaccagactaaaaagggccaacccattagggaagtacctccctggggagcgggtggacagggaaagaaggtttgatggcagttattaaacactgattcaagaatatgtttagaggagctgcgacccagggaaatcctgcctcccagtcttagctgggcgagggacagttaagtaaaaagagttctgcttattctctgctgcaggatgctaccccctgaccctttataagtcagccttgcttgattactccttttaattcaaggctcaaaacagcttgtaaagttttttttatcattcctttccagattgtgtgggccacactgtagcattttgtccacatctgttttccaacctcattactcttctgttattacattcattagaaaaaagagctgtttatttcttttccgcatgttttccccctagtttcaaaagctaaaatggtaaatcatgtggtgtttgatgtgaccatctccacgatttctagtgtacaaattgatggttgcatatacaggaattggttgaaccttattgtttaaattagctataccccagccaaagctcacaactcatatgaggctgtttcactgtagactgagattgtcaagacttctcatttctgtatcagaatggttatatcattccctccagggcgcatagcaataacgtgaatttttttgtctagtatgactcctgcgcactttaatttgaatataattatttaaagacacatggaagctgggggcagagctttagaatttaggatggttttcctagtgaagagaaagctaagagagatgagacaaggatgtccacgaataccgtttctattcagtgttatactagaagtactacccagagcaatgaaataagaacaacagattagaggaataagaattggaagaaaataggacacagctgaccttatttgcagattatattatttgcttcaaagacaatccagaagaatgaacaaactgttagaattaataaaataattcagcaacattgctggatacagaatttgaggatgttctttcatgatggtaataaccaattagaaaaaaaaaagatcctatttgcaataataatcaaaagcacaaagaagctaggaataatccttagaaaacatatgcaaaacctttacaggaaatgtataaggcaaagttgaaggaatgagagaagacccacataaatggacataacatattcatagatagggagactttttttttttttttgagatataattctcactctttcgcccaggctgtagtgtagtggcacgatctccactcaccacaacctccgcctcctggattcaagcgattctcctgcttcagcctcccaagtagctgggattacaggcacgcaccactgcgcccagctaatttttgtattgttagtagaggtgaggtttcgccatgttgaccaggctggtcttgaactcctgacctcaggtgatccacccgcctcggcctcccaaagtgttgggattacaggcgtgagccaccttgcccggccaggagacttaattttttttttttttttttgagacagagtttcactcttgttgcccaggctagagtgcaatggcactatcttgactcaccgcaacctctgcctcccaggttcaaccaattctcctgcctcagcttcctgagtagctgggattacaggcatgtgccgccacccccggctaattttgtatttttagtagagatggggtttctccatgttggtcaggctggtctcgaattcctgacctcaggtgatccacccgcctcagcctcccaaagtgctgggattacaggcatgagccactgtgcctggcccaggagacttaatatttaaaggctgtcaattatccccaagttaatctagaaattaaatgaaattcagatgaacatcctaagaagttttgaattactcaaagtcttagcaggaaaccaatggcacacacagaagtgttcaccgaggggagtcaatgaaggacctgtttacaaaggtgtggacaaagcttaaggaaaccaagaaaccaacaggggaaggtgaggcaccctaagctagcaaaagcaaagaagcactgttagcacccctgggcctgaagctgcaagcagatggaaccgttatcagaacccagacagtgctctagctttagctgtagagaggcccacctggcaggccttcggtagaggaacagctgctactaacctggacataggggtgagagagccaaggagagaaataccttgacctgttcctccttttgcccttcattctctttccattgactctcattagctgaatataagaaggagagacccagtcgatgctgcccatgcagaggtcagcctcatgggacacagaacaaggtgaagagtggaaagtgtttctgaaggagcaatcagagaatatccagtgcaggtgtttttcatagtatttttcaaggtgatcttgaacttcatgtggaagatcggaggattaaaaccagcaaggaaagtttttgaagcaacagacctattatgacttttatttaaaatctcaatttctttcctgccagatattaacatgtattataaagctgtaataattaaagcagaatggtattgtttcagagaaagacagacagtggaacataatgtacatatatgtagaaacttgatatattacaaaccagtgctgaaagatggactgttcagtaaattgtgctgcgacaaatgattatccacataggaaaaacttaggatttcattttagggtagcaaaaataaaaaattctgaccatgcatgttggcaagggttggatactcatacactgttggtagaagtataaatcgacataatcctatcagcgggtaatttacaatgtctagtaaagttatgtggattctagagccagactattccctgtctgtaaaatggggttaacaagtgatcctcagaagattattgtgaagattaaatgagtttatatatatataaaattatatagatataattcttggaacaatggttactacaaaataagctctatttaaatgtgtcattattattgttatttctagatcttgcagttctacttctaagtatgtaatccagagaaaattctgacttgtgtataaaagaagactcattcaataatgtttatttcaaatgaacaaaaaagcagctgaaaaaaatcatgatatattcattgtatagcagtaagaatgaatgaagtaaacctgtatgtagtaacataggtaagtctttttttttttttttttagagagagagtctcactctgttgcccaggctggagtgcagtagcatgatattggctaactgcaacctctgcctcctggtgcaagtgattctcatgtctcagcctcccacatagctgggattacagggatgtgccaccgcgtccagctaatttttgtatttttagaagagacagagtttcaccatgttggccaggctgggctcaaactcccaacctcagatgatccacccacctcggcctcccgaagtgctgggattacaggtgtgagccaccatacccagcctcatagataagccttaaaaacatattgagagtgaaataaaaccagattgcagaggaatatgaataatctgatattgaggaggcaggagacatgagaatgggaaatggcacagagagatttcagccctatctctaatatctcatacctttcaaacattttctaaaatctgagccaaaaagagagctaagccattaattatggtcaggttttagaaatataaaagggatattagaagtatgatagagagaaattgctctacagagaaattgccctgtgtggtctttggaggcagacagccctgtattcaattccactgtttatttttattagctgtgtaatcttatataaattatttaacattagttacctcaccgggttagtttgacaattacatggagtactatatataagaaagcacaataccagccaggcgcaatggctcatgtctgtaatcccagcactttgggagcctgaggcaggcagatcacctgaggttgcgagttcaagaccagcctgaccaacatggagaaaccctgtctctgctaaaaatacaaaattagccggcatggtggcgcatgcctgtaatcccgggaggttgaggcaggagaatcgttcgaacccgagaggcagaggttgcagtgagccgagatcgcaccattgcactccagcctgggtaacaagagtgaaactctgtctcaagaaaaaaaaaaaaagaaagcacagtacctgatacataacagatattcaataattgttcccttccttcccctcttatacaaggaagaaaaaagacgaatcaacatctcccttggaaaatactctagaccaaatttctgcttctgtgggcctggtttctacaatcttgtttggctacaattcatgttgactttacgtaaggattgccaattcatgcccaaacttagtgaagcaagctcacttgataaagaaatgaatttcaggatttaactatgtaacaccatcattcttttttcccccccatcaagtagtatatctgccagggtttgtgtgtgtcatactgtcctggactctgtatagcaaagatttaatgaccatggaccttacctttgttctaaaaaaaaaatctttgactccaccatttttataataaacacttgcaaactcacaccttctcttgctaactgagcaggagaatagttgcttgtttctttctctatataaaagacaaatgtctttatcttgtggaaaatccagtgtcacctttcatagatactaaaatatttcctttcttcatttctaatgagacttcctgtttggttattgtttttataaagatatgaaatccatatgaaagctcttgtggtcagggtcagttattccaagggggaagcctgtcctcacgttcattaaaatgatatctcttctaggcatacctcttttgatcattaacgagcaactgaatacttttcttatgaatacttctgtaacaaccaaattagcaaatatagccttgtgcttcaggatttgatcttatttttaccttagtacttgggagtttagagtaaaacatgcaatgctaagaagagactgtgcaataggtaaaggagacaaatggcttaaagagaaagagacacacaccatccacacacatgatcattagtggacagagaaaacggccagtatgtggaaattaaaaggacgatctttcttgtatgcttctcacaagaaaattcatcctgagcaatttcatttcaggcaaggcttgggaaaggggaattagtttccaaagaaacctatgagaagcaccttgggcctgaatgatttaacactgaactaagacttggtatctgagaagctgtatctaagagtggagagatgaaataagaggcttaggaaaattttcctgcctagtgtcctcagggtttaccaagctgaccttacatgtaggtactgttttccaaaactgacatatttaggaaatctttaaaaatatctaattgccacaattagtatgactcacagccctttgcaccttctgttgttatggagtccatcccatttcgtgttagaaattttctgtaatgtaagcctatttagtctattttctcccactttgtaaacaccctttttccatagttgcaaatgtctccaccattatttgtttcaatttgtaaatttcagaaaggctagaataaacagtgtcctcacacacgcacattcatccattgccagacatgcactatctctggccagagatatagtcaaaagggtaccctccatactttctttatagcaccagaattccaaagtgagattctttgcttcttgtcccctttctaccaggataggaaagttaattttttgtgttgttgtttgtttgtttgtttttgagacggagtctcgctctgtcgcccaggctggagtgcagtggtgcggtctcggctcaccgcaagctccgcctcccgggttcacgccattctcctgcctcagcctcccaagtagctgggactacaggcatctgccaccatgcccagctaattttttgtatttttagtagagacgaggtttcaccgtgttagccaggatggtctcgatctcctgacctcatgatccgctcccctcggccttccaaagtgctgggattacaggcgtgagccactgcacctggctggaaagttaatttttaaattgccacagtggttggtaaattaaaagatattaagtcatgatgtcaagacttttattttttgaaaagaaaaaactaatttaggccaggtgcggtggctcacgcctgttatcccagcactttgggaagccaaggcgggcggattgcttgagatcaggagttcgagaccagcctggccaacttggtgaaactctgtctctactaaaatacaaaaattagctgggcatggtgatgtgtgcctgtaatcctcctggattacaggcacacatcaccttgaatccagcaggcagaatgagccaagatcgtgccactgcactccagcctgggcgacagagcaagactccgtctccagaaaaaaaaaaaaagaaaagaaaagaagaaaggtggcaagaaggtgaaacatggaattttccagagcaaagccaggaagtactgtgtaagaaaggaccatgtgatctgcaacatgaccgtaggggaagactctgccctcctttgttttattctcctccacgtccgagaacctgtcctatataggtcttcgtgtgtacaaagctcaccgaaaacccatactcacccctccccgagaaaactgggtcacatatctcttgaatatttaatgtaatgtcctacatttggtgcctagagagaaactgttactcacttgtagatgtcactcaggccacagacagactgtcattcactgaagacacagtatccttagtcacatttgatcttggggactctgcatctctgcttcttccacctttgtctgttttgcatttgtcatttattcattcagtattttctattagctaaggattgattgcttgactactcagacttgcaaattaataagacatagactctgtgtttaatgtatattcctcaatctagttgggaaagtagaattttacagtcaatgatagtgtttctgcctgtctatccctctctttttgaatcactaccaccgacccccaccactaccacaattttttcattttcttttgctttctatttgccagattcaaattattttttaaattgtcatataaaagaaaatataacattatcatcttaagtgtccactacagtaatacgtatgtatattatggtacaacagctcactagaatttttcatcatacaaaactgaaactctatacccattaaacaattcccatccccaccagtaattgtctttctgggttttttttgttttttttgttttttgagacacagcctcattctgtcgcccaggctggagtacaatctcggctcctgggttcatgcaattctcatgcctcagcctcttgaatacctgagattacaggcatgcaccaccaaacccagctaatttttgtattttgagtagagctggagtttcaccattttggccaggccagtttcaaactcctgacctcagatgatctgcccacctcagcctcccaaagtgctgggattacaggcgtgagccaccacatccagccagtaattgtctttttatgatttgcttatttcacctagcatgatgtcctcaagagtcatccatgttgtagcatatggcaggatttcctttttttttaaggctgaataatattcccctgtatatatatgtatataccccattttctttatccatttatccatcagtggacatttaggttgcctccatctctttgactattgtgactaatgctgcagtgaacacaggtgtgcaaacatctcttagaaattgtattttcttttcttttttttttttttgaaatggagtttcgctcttgttgcccaggctggagtgcaatgctgtgatctcggctcaccacaacctcagcctcctgggttcaagcaattctcctgcctcagcctcccaagtagctgggattacaggcatgcaccaccacacctggctaattttgtgttttttagtagagatggggtttctccatgttggtcaggctggtctcgaactcccgacctcaagtaatccacctgcctcgacttcccaaagtgctgggattacaggcatgagccaccgcgcccggccattatattttcaattcttttgaatatatatcaagaagtgggattgctggattgtatatggtaattctatttttaatgttttgaggcgtctccatgctgttttccatagtgactacaccatttacattcccaccaacaatgcacaagggttccaatttctccacatccttaccagcacttgttactctctgttacatttgtttgtctgtttgtttgttttgatagtggccaacttaatgggtgtgaggtgatctaccattgtgattctgatttgcatttctctgatgatagtaatgttctgctagcaacttttcatacaacttgttggccatttgcagttattcttggattaatgtctattcaattcctttggcctttttctttctttctttttttttttttttaattaagacaaggtcttgctctgttgcccaggctggagtgcagtggcatgaccttggcttactgcaacctccgcctcccgggttcaaacgattcttgtgcctcagtcccctaggtagctgagattacaggcacgtgccaccacgcctggctaaatttttgtatttttggtagagacgggtttttgccattttttccaggctggtctcaaactccttgcctcatgtgatccacccacctcagcctcccaaagtgctgggattacaggagtgagccaccaggcatggccttctgccatttttttttttttttttttttttttgagacggagtctggctctgtcacccaggctagagtgcgatggtgcgatcccggcttaccgcaacctctgcctcccaggttcaagcgattctcctgcctcagcctcctgagtagctgggattacaggtgcccgccaccgcgcctggctaatttttgtattttttttagtagagatggggtttcaccatgttggccaggctggtctcgaactcctggcctcatgtgatctgcctgcctcggcctcccaaagtgctgggattacaggcataagccaccatgcctggcccttttgccgatttttttatcaggttgctttattgttgttgagtagtaggtgctctttatacattctggatgctgcccctcatcagatacacagtttgcagatatttccttccactttataggctgccttttcacactgttgtctcctttgcgacacagtttttaaatttgatgtcgtcctatttgtctacttttgctttcattgcctgcgcttttgttatcatatgttacaaatcattgctaaatccaaatgtaatgaaacttctcccctatgttttcttcaggtagttttatagtttcaggtttatattttttgttttgttttgtttgtttgttttgagatgaagttttgctcttgttgcccaggctggagtgcaatggtgcaatctcggctcaccgcaacctctgcctcccaagtagctgggattacaggcttcaagcaattctcctgcctcagcctcccgagtagctgggattacaggcatatgccaccatgccaggctaattttgtatttttagtagagaccgggtttctccatgttggtcagcctggtctcgaactcctgatctcgtgatccgcctgcctcagcctcccaaagtcctgggattacaggcatgagccaccacacctgggtatatttaggtctttaacacattttcagttttttgtacatggtgtaagggaaggatccaacttttattctttttttttttttttttttttgaaatggagtctcgctctgttccccaggctggagtacagtggcaccatctcggttcactgcaacctctgcctcctgggttcaagtgattctcctgcctcagcctcccaagtagctgggattacaggcgcatgccaccacgcccgactagttttttgtatttttagtagagatgggtttcaccatgttggccaggctggtcttgaactcctgacctcgtgatccgcctgcctcagcctcccaaagtgctgggattacaggtgtaagccaccatgcccggatttttttttttttgtcttaggtggagtctcgctctgttacccaggctggagtgcagtggcgcgatcttggctcactgcaacctctgttttctgggttcaagtgattctcctgcctcagcctcctgggtagctgggattacaggcgcccgccatcacgcccagctctgtgtgtgtgtgtgtgtgtgtgtgtgtgtgtgtgtgtgtgtgtgtttagtagagacggggtttcaccatgttgaccgggctggtttcgaactcctgacctcaagtaatccagctgcctcagcctgccaaagtgctaggattacaggtgtgagccatcacactcggccccaactttattctttcacatgtagttaaccagttttcctagaaccatttggggtttttgttttgttttgtttgaacaaggtctctctctgttgcccagacaggagtgcaatggtgcaatcatacctcactgcagcctcacactcctgagcccaagcagtccttctgccgcagcttctcaagttgctgggactacaggcacacaccaccatgcccagctattttttttattttttgtagagatgatgtatcgttctgttgcccaggctggtcttgaactcctggcctcaagcagtcctcccacctgggcctccaaaagtgctggaattagagatgtaagccatcatgcctggctaccattaattgaagagactgtcatcaaattacgttttaaagaaaagactgaaatatattccttctatagaaaagcacttcaaacatattgtatacagaagcaatcaatgagtatgcagccaaaatataagaaaataagaatgttagaatctttttgggtgcttaatgaaaaatactaggttgttttttaggatttggtgatatttatggtgtttgtgagtgtttaaaaacatgtaattttgcccagggcacagaggctcatgcctgtaatcccagcactttgggaggctgaggcgggcagattgcttgagctcaggagctcgagaccatcctcaggaacatggcaaaaccctgtctctacaaaaaatacaaaaattagccaggcatgatctcatgagaccacatctgtggtctcagctactcgggaggctgaggtgggaggattgcttgagcccaggaggtcaaggttgcagtgagccgggagtgcaccactgcactccagctggtgacagagtgaaaccctgtctcaaaaaaaaaaaaaaaaaaaaaaaaaaaaaaagcaattttgatcatctctcctcattctaagtaaaaattactttcatatataagtcgtagtgtgtaagtttcaggctatccataactagatctactcctgttcagatacattacattttgtatcaattttgcctttttatctcttgatatctgccccaatctagatgtgttgaccttcatacctgaaacagcatcgtctgtggtctctcttcactgtcacgctggggagtccctttggctcacttctgcattagatctcctatgccctcctgtatcccctgtgttctttcttggcttacttccttgccttggtaattcctttatgtagatctgagtttcaattttccttcacccagatttctgttaacatttcttgaaataccagtatgctagctagaattctcttagcttttgtctaaaaatgtctgttttgcctttattttatttttttttttttctgagacatggtctcactttgtcacccaggttggagtgcagtggcatgatcatggctcactggcagcctcaacctcccgagctcaagcgatcctcccacctcagtcccccaagtagctgggactacaggcgcgcaccaccacccctggctaattttttgtattttttgtagagatggggttttgccatgttgcccagactgactacctttattttaagggatattttgctgaatataatgctgcatttaaaaaataccattttttaaaaagccagatgtcattctggcttgtgtggattctgacaagaagttagcagttattctttgttctgtatgtcatatgtcttttacctctggctacttttaagatttgtttatctgtttctcaccattttgatgatgatgtgctctggattgcttttatttatgtatatcctattttatagtttgttgagtttcttggttctatgagtttatcatttttatcaaatttgaaaatttcctggttatttttttcaaaaatttttaatgcctgaccctccctctaagactccggtttcatgtatcagaccactaatattgtcgcatgggtcactgtggctctgttcttttttttttttcttagaagttttctttttctctgtactacagtttagtttctattgctgtatcttcaagtgtataggtctctgtagtgtttaatcttttgtcaagtcaatttagtgaattttttatttttagaagttatgtttggttctttttatatatctcccgtttcctatcttcattcttttttttttcccccactggcttaatttattttattttattttttaaattttattattattatactttaagttttagggtacatgtgcacaacgtgcaggtttgttacatatgtatacatgtgccatgttggtgtgctgcacccattaactcgtcatttaacattaggtatatctcctaatgctatccctccccactccccccaccccacaacagtccccggtgtgtgatgttccccttcctgtgtccatgtgttctcattgttcagttcccacctatgagtgagaacatgcggtgtttagttttttgtccttgtgatagtttgctgagaatgatggttgtgttcacactttctttaaaatctttgaatttttttttttttttttttttttttgagacaagttctcagtttgtcgcccaggctggagtgcagtggcacaatctctgctcactgcaacctctgcctcctgggttcaagcagttcttctgcctcagcctcctgagtagctgggatcacaggcgtgtgccaccacacctgcctaatttttgtatttttagtagagatggggtttcaccatgttggccaggctggtctcaaactcctgacctcaggtgatccacccactgcggcctcccaaagtgctgggattacaggtgtgagccactgtgccggcctgaacatgtttttaatagctgtttgaacttccttatattaaaaacctacagccaacaccagacataatgaagactgaaagctttctcctaagatcaggaacacagcaagggatgtccactctcaccactgctattcacccaagtacaggaggttctagctagtgcactaaggaaaaataaaccaaaagcatctcaattggaagggaagaagtaagactgtttctattgctaggaaacataattgtctgtgtagaaaaacccatgaaatctaattttattaatttatttggagacagggtcttgcagtgtcactcaggctggagtgcagtagtgcaaacatggctcacttcagcctctatctcctggtctcaagtaatgatcagcatttgagtagctgagaccacagatgaacgccaccatacttcactaattttttaatttttttgtagagatggggtctcagcatgtcgcccaggctagtctcaactcctgggctcaagcgatcctctcacatcagcctcccaaagtactaggattacaggcattagccactgcacccaaccctgaaatctgtttttgaaaagctactggaactaataagaagtttaacagcatcagaacataagatcgatatgtaaaaattgattgaattgtctatgtgctatcaacaaataatctgaagttgaaattttaaaacaataccatttataataagtaaatatcatagatcttgaatggaagtatatagaataaaggattcattatagggattaggtctatacagggccttatgtgattgttggtgctgttgaagagtctgttgccattgagtctcttggtgggcctgaatgttgtgcagggctgaagctgggaagaaagctcagtgtttagcggcagagagaaagggcaaattggaacccatgtgcatttctcagccaggatctcaccttgtcgcccaggctggagtgcagtggcacaatcacagtgagcagtggctcactgcagccttgtcagtgcctttagccttgataaaatggttgactgacctgcagaaggagctggcactcttcactacagaggtgcacatgcacttggcccagaagtcagataatttgaaggagactatctcatgagagctggaagacatgtagcccggcaggctggccagcacatcagtgacggtaagcataaactgccacagcaccgtgtgccctacatttaaccttcagagcgtaatgattgctgccatcttccaccttccaaatctcatggaaatttttcttatgattaaccccaactcataatcatacatggaagagaattatctgaatcgtagttccagattagctaaattgatacagtacaaagtcattataatacttaatagttttttgatagccttaggtataaaaccttataaacggcaacctattttgcaaggttgtaggatatactatcagtatataaaaatcacttgtgttggccgggtgcggtggctcacgcgtgtaatctcagcactttgggaggctgaggtgggcggatcatgaggtcaggagttcaagaccaggctgaccaacatggtgaaaccccatttctactaaagatacattaaaaaattagccaggcatggtggtgagcacctgtaatcccagctacttgggagagtgaggcaggagaatcgcttgaacctgggaggcagaggttgcagtgagccaagatcatgccattgcactccagcctgggctacaggacgagactccatctcaaaaacaaacaaacaaacaaacaaaaatcacttgtgtttctatacagtagcaatgagcaaaccgcaaataaaattaggaaagctatttcatttacagtagcatcaaaaagaacaaagtactcaggaataaatttaaccgaagtaaaaattttataaactacaaatcactgggagaaattacagaagaactaaataaatggaaagatactccatgtttatagatcagaagacaaaattgttaagacggcagtgctccccaaattgatctacagattcaacacaatctctatcaaaatgatctctatcaaaatctctatcaaataagctgacttatttgcagaaattgacaagctgatcctaaaatttacatataaattcaagggtgcagaaaagccgaaataatcttgaaaaagaacaaagttgaaggcctcgacttttcaatttcaaaatatacttctaagctacagtaatcaagacagtgtggtactggcataaggatagacatataccataatggaatagaattgaaagtccaaaaataaccctcacatttacagtcaattgaattttaaacatggatgtcaagacattttctatgaggaaagaatagtagtttcaacaagtggtaggctgggcatggtggctcatgcctgtaatcacaatgctttgggaggccaaggcaggaggatcacttgaggccaggagtttgagaccagcctgggaaacataatgagaccttgtctcttataggaaaaaaaaaatttagaggggcatggtggcgtgtgcctatagccctagtaactcaaaaggctgaggcaggaggatcgctttttctaggagttcaaggttgcagtgagctgtaatcatgtcagtgtactccagcctgagtgacagagcaagaccctgtatcaaaaaaaaaaaaaaaaaaaaaggtggtgatgagacaactgaatatccacatgaccctacctcataccatacacaaaaattaactcaaaatggatcaaagacctaaatgtaagaggtgaagctataaaactcttagaagaaaacatatgagtaaatctttgtgaccatggattaggcagtagtgtcttacatatgacaccaaaagtacaaacaagagaaaaatagataataaactggacactatcaaactaaaaaacattcaggcttctaagaaccacatcaggaaagtaaaaaatgacccacaaaatgggagaaaatttttgcaaatcatatatctgataagggacttatatctagaatatataagaactactacatacatacacaataatgatatataacccaattaaaaatgggcaaaggatctgaatagacagttcttcaaagaagatacacaatggccaataatcacgtgaaaagatgcccaacatcattaaccatcagagatattcaactcaaaaccacaagcagatactacttggcacccactaggatgactatgatcaaaaagatagataataacaagtgttgataatgatgtggagaagttgtaaccctcatacactgctggcaggaatgtaaaatggtgcagctcctttagcaaactggcaatttctcagatggttaacagagttaccctattatccaacaattccacacccaggtgtatacccaaaagaaatgaaaacatacccacacaaaaaatggtttgttttgttttgttttgttttgtttgacggagtcacactgtgtagcccaggctggagtgaggtggtacaatcttggttcactgcaacctctgcctcccgggtcctgattcaagcaattctcctgcctcagcctcccgagtagctgggattacagacacatgccacgatgcccagctaatttttgtatttttagtagagacggggtttcaccatgttggccaggctggtcttgaactcctgaccttgtgatccgcctgcctcggcctctcaaagtgctgggattacaggcatgagccaccgttcccagataatttttgtgttttttgtagagacagggtttcgccatgttcccaggcttatctcaaactcctgggctcacatgatccacccaccttggcctcccacagtgctgggtttacaggtgtgtgccaccatgcccagcctctatcaactgttggatggacctacccaaaggaattgaatgcaggaacaggaacagatgcttctgcgttccttgtggcattattcactatagcccaaagatgccagcaccctaagtattccaacacattcatggataaacaaaatgtggtgtgttcctacagtggaacacaaaatattccataaaaaggaatgaaattttcatacatactgcagcaaagatcagccttgaaaatatttgtgactggaagaaccagccagtatggttccacttatatgacatgtccagaataggaaaatctatagagacagaaagtagattagtagtggtttcctaggacttggggatatggggagattgggaggtagtggctaagtggtacagggtttcttttcagaacaatcaaaatcttctaaaatagattgtggtgatggttgcacaattctgtgaatacactaaaagccattgaattatgtacttttttttttttttttaaagatggagtcttgctttgtcacccaggctggagtacagtggcatgtctgggctcactgcaacctcctcccagattcaagtgagtctcctgcctcagcctcttgagtagctgggattacaggcatgtgccaccatgcctggctaatttttgtatctttagtagagacggggttttactgtgttggccaggctggtcttgaactcctgacctcaagtgatccgcccacctcggcctcccaaagtgttgggattacaggcatgagccaccatacctagcctgaattatatactttaagtgggtgaattgtatgttaggtgaattatatctcaataaatctttttttttttaaggcagcctaggtctgacacacctaatagaacagaagctctcgcttctttcttctctttccatcagtcagtgatgccctttgtgggcaggtttgtgcacagatcaggggttccattccattccttattatttgggttcttcttgaagagcagcttctgcctagcccatggtggctaagagattcacaagccagtttgtattttgcaaactttcccttggggcctcagcagaggatatttttagaacagctgtgggtctaattttgatgtggcccagtgactgtacaccaggcctcatcactgccttgggataagcatatattacattcagtcttaatcccttggaggacacagagttgttcagtccatcctggtgtagaccacaaaccatgtttaaaatagtgggctaagccactgggcctccatggtgaggtggcactggtccctctgcttgagtgaagaaaaaaaaaaaaaactaggcaggtaaccacaagccaagttgggcttggctgctgcaggctgattggatgactgtggcagtaccagctttgctaaatctcctttggctcactttttctccctctccatgtctctacatctttcttttctctcaatcctgctcctgctgagtctacattaactctttgtttagcttggctccagaaccataagtactttcctttagtcaaatatttatctcttgggtaattttctccctactgtcagcagaactcaagaaatcctctggttcaacaaagagtagagtttaagggacctcagaactcttctactccaaacctcttcctttatactcgaagaccctggtgcccagagagaggaagtattatgccaaagttacccaccaagttaggctaggcctgggatttggtaccattatctcctcactcatggctcagtactctttccatttttgaatgaagaaagacattacagaaagaagcaggattctgagcaaattccaaccacttgcaattatctttgtgatagatacagacataggatcaacagtagtccacctcaaagacagttattgtttcttaaagtccaagaggctattggttatcactgagtccaacttggggaggtcatcagatttgtctttggaggggaatgtgaggtagttgacctggtagaaagtgtctaatttggaatcaggattcaggtttgagtcacaactttgccacttaaagatttcacatcttgtatgagtaatttattctctgtgcttcaatgaatagatctatatagcaggagtaacagtacctaccttggagtgtggttgtatagatttgataaaataatgaaagtaaaagcttattttaacttgaaacaaaaggtgtattcacatgaaaagattggcattgttgtgtgtgtgttcagcaagaagtgaccccctccaagtgtattcttatgacagattagtgcttaaagtgggcagcgccggagctaaaggttccgccagttctcttcacacatgcctgatcatttgggcagcaaagatggagctatctgggaatgtctcgacccttaacaggttgaaggctttctccaacaagtcccaactgattggcctgctgtattcccgcagtatctaagccttctaaaaaggtattacatactatgtggtttaaaaagaaaatcaggcacaaaatggtataaaaagagacctactcttatctcccaatccttgcccagaggaaacaatcactgtcagcagtttactgtgtatcattccaaagatattctgtgcatccttttttctttgcatcgaaaaaatacactactatgcacactctttccatatatcaatacatcttggagatttttccttttttagtatttatagaatttccttagagacaacatagttttccacaatttatttcacaatgcctattgttggatgtatagatggtcttcaatcttttgtcattataaacagtgttaaagtaaatattttatatcttaggacatttgtgtaatttcatctgtataaatagttcttagaagtagaattcccaggtcaaaggataagtgacctaggaattttttgtaatttaattatttaatgtcaaattttccatcatagtcaccatactaagttatactcccacccccaggtatgagagtacttatttctctacgccttgccagtacagtgtgttatcagattttttggtctctgcaaatcagattcaatgtgtcattttattgtaatttaaatttgcatttctcttagactggcatggaacgtattttcacaaatttaaatgccatatttagttctttcattgttcatggtctttacccatctttatactgggttttttatcttattcatattgatttggaggagctttctatatactaagcaaattagcactctatcatatatattataaatatttttccaagtttgtcagtatctttgccatacaaattttaaattttatgtgtttatcaataatttctggggtttgtatcatattaagtatagctttctcatttctctgtttttaaaaaaaattcttcgttttatggtaaatttttactttcttttccgctacttcctttttacaagactgttgtgcacataatagatgttcaagacttttttctaaacagctatttcaatttaggctgtttcatgtaatgagaggaagactgaatttggattcagaagacctcattgacaactaactataacacattcaaactagttactaggtacctgcctcctgcatttttgtgaatatctaataagatcaagtgaatttaatatatgagaaagtcctttttaaagtataaagaaattatttgggacagtttttcagtgaacacattcatatatgcttttattatttttctccctaattggtctcaggtttgaaataaaatttgtctctaggaaaaagcaaagctcataaatgtggggttttctttattgcttctttgggaataccttaccgatgagaaggctttcctgagccttggttgggagctgaatgagaaggggcaattgggcctctggtgaaaggttctccccaagtgtccaaactagtaccttttaagagtaggatggttggaaaaagtgggcaggacatttgcataatattccaggacagagagttcacttttattgggctgaaagagttcaaaggcaaagtcttctgggaactaaagttggtttcgttggcttactcttagacagatgtgacttcctgtgtcagcgagggaggctccaaggacaagttgaatgcccaagttatagaaagttatgtttgtattggtcgttgttaataaaacagagtatctggggtgtttgaaaaagaaggaagcccatcaacacagaggattatgaatcagacccttccagaagtctctatacctcactttgagagaatttccattttggtttaatgagttggtcacattgcatcatccctttatctacccaaaatgtgaattttaaacattttttatccagataattttttcacagagggaaatgcacagagcttaaatgtgcaagtaattaaatgagttttagtgaaggggagaaatcacagtaaaaatatatattttcaatatatttgtatattatatataatacatattttatatttttatatataaatttttttcactgtgattttccccctttaaaaataaatcagcccatggcatcttttatttaaataatactatgatgtcgtgatgttgtaatactaaaagttgtgttgttttttttgctccacgttgctcctttttgtattgaaaacgattgggcagccatgacattcaatggtgctgcctagttccttcagagattttaccgttttatttatgttttaatacaaaggtgaccatttttactggaaaagtaccaatgaattcaactagtcttggtttggaggactataacacattcaaactagttagcttcatccaccagacattaagcacccactctatgctaagtactttatgttacgtttagctcattctccctattatatttagttaactctcctatttagttcatcagcgatgatgaagggaagaccaagtgaatttagaggggatttgtaccaaaatgaggttgcaaaagtaaattgattttttttttttttttgagacgagtctggctctgtcgcccaggctagagtgcagtggtgccatctcagctcactgcaagctccgcctcctgggttcacgccattctcctgcctcagcctcccaagtagctgggactacaggcgaccgccaccatgcctggctaattttttgtatttttagtcgagacagggtttcaatgtgttagccaggatggtctcaatcttctgacctcgtaatccaccttcctcagcctcccaaactgctgagattacaggcgtgagccaccgcacttggccgtaaattgattttttaaaaaaaaattttagagacagggttttgctctgtcacccaggttggaatgcagtgacgcagtcatagctcactgcagcctcaacctcctgggctcaaacagtcctcctgcctcagccccccaagtagctgagacagcaggccaccacacccagttgtaaattgatttttaagcagttagaacttgaactgattcacctgggcagctttagttgtatctttggtattacgatcttgagaggtgaagccggctgggcttctgggttgggtggggacttggagaacttttctgtctagctaaaggattgtaaatgcaccaatcagcgttctgtgtctagctaaaggtttgtaaacacaccaatcagcactctgtaaaaatggaccaatcatcactctgtaaaatggaccaatcagcaggatgtgggcagggccaaataagggaataaaaattggccacctcccccacccacaccagcagtcgcaaacctgctcaggttcccttctatgtcaggaaggtttgttctttcactcttcacaataaatcttgctgctgctcactctgggtccacactagctttatgagctgtaacactcaccaggaaggtctgtggcttcattcctgagaatgaagtcagcgagaccacgaaccgaccggaaggaagaaacactggacacatctgaacatctcaaggaacaaactccagacacaccatctttaagaactgtaacactcatcgcgagggtccgcggctggttcttgaaatcagccagacccaagaacccaccggaaggaaccaattccagacacaatctgaagacttgttcacctccgatgctgcttctgggctctttgcaattagcagtgcagcccacaactgcgtttttttttttcctctactctttttttttttccctcctgctgtttaggcttcattctaactagcttttcagcctatgtgggcatttatttgttcccttaaggccatgccagttgttgcaaaggtagagaaggaatcctcagaagagctctcagggtctctgcttaggaaagcctccactcaacagtaagtgaggagatttgcccaggcatggcagggcatagcacagtgacctgatgccacctcagaagggacagcagaagcttccccagcacctagctagtgcctgttgttgaatgaatgtataagtgaagttttcaagcaagtgtcatcaaggttctctcctggttctcctgtctgtaggcttctgaaagctttgctgccctaaattcctgtccttggtctctgttgggaccatgcctactgactgatgctaacctcggggtctcttctgtcccctagtgattcaaaccagctatcctgaaactgcttccacctgggcagaccagggaccacaggaaccagagaaatgaaaagtatcacttgagaactaaattggggtgttttgcttttcccctcctcctaggttgtgtgtgtgtgtgtgtgtgtgtgtgtttcttgctaaaatgcagcaaaggaaggggaaacaaatacaacagtgcacggcagagtccctgctaataaatgtatataaaagaactgagtgctgcttctccaacataacttccaggtctgaatactttgttttctgcagattttcaacaggtgtcagttacactttacctggccctaaagtgaaaagctctacatgcttggtttggtttatccataggatctagactagactagactagaggattgacgcagtgaaaatgtttactcctctaattaagcagaattaaggtctgggctcaaaactgtcttgagctgtgctaggcataattgagatgcatggactttgtgtaaataatgtacttctaattggctttgattaagtgcaaattagaatcacacttcactccagtgtgatttacattcctaagcccttttactaactgaagtactgtgggtggccgataaggcttgtttatccaggagacaagagactaggagctaggagctgcggatctgcagtttcccaaaggtaaaggagcctgcagctgagcctcgagtttctcatgtcttccctcccatctccagtccctactttaggcgaatcagctttagtcctctaaattctaaagctctaccaatttttttttagtttcaagacttagcttacacacacactcaagttacgtgaatacatgaatattgcagtttgtcttgtgaaacctcagacctaaaaccagccccaggctttgactgtcaatatcatgacacctttttactcatggaccagaaacatttcataaaggaaacaactggtgggaagttttttccagagagttcccagtgtgtgagtgtgagtcaacagactgctacaaagtagcttaaactctgcacacatcttcctctgggatttctttgcagctttcaaagggtagatctttgcaaccatcccttggggagcctgcagggcggggtgcggagggtctgcgggggtggggcgctgccgaatatgagacatttcctcttgcttctgagttctctgaatctgcatttgaaagttatcgtgagcagatgaagcagaggttgctgggtttatactgatgtctgcgcccactcctgtgctggtgaagtctggcgtgtggagaggcctctggttattgggaggctggtaaatggccagcaggatagaaatccgacgtggtgtttatgaccctggaggccatcgataactggacctagaagggtttctccagattttctcacgttagcatgctgctgcttggtgcacgaccaaaaagtaacatgtcagaatagggattttcacaccagcagagagtgctaacagtgtgccaggatctgtgggcacgctgttagcagggctaagttaaatactcgctttacaccgttgtgaaggcagctcccagggcagccagaggagcatgtcaccttcagagtaggttggactgtaaatatgtttggtctctaaactctgccacgggcttaccagagtgagaagttagcatattgaggcaaattacactacagagatcctggccagggtgaggaaagacagagaatgctttctaggacctttatactgcattcattcatttattcattcactgaaactttatgggccacctactgagccagacaccagagatgcaactagaaagatgccatggtctttacacctaaagagctctatggaggccaggcgtggtggctcgcgcctgtaatcccagcactttgggaggctgaggtgggtggatcacaaggtcaggagatcgagaccatcctggctaacacggtgaaaccccgtctctactaaaaatacaaaaaattagccgggcgtggtggcgggcacctgtagtcttagctactggggaggctgaggcaggagaatggcgtgaacccgggaggcagagcttgcagtgagccgagatcgcaccacttcactccagcctgggcaacagagccagactcttaaaaaaaaaaaaaactctatggagttggggaacagatctctatagagataaatgagaaccaaatgtggtagatgctgcagcagagaggaggaagcctgcggtaggggctgtcttggggaaaattgtctgccatactgcatttgttcagagcaacgtggagtcagcttgagggccacatgctgttccaagaaagtgtactttgcagggcgtggtggctcacacctctaatcccagcactatgggaggctaagacaggaggattacttgagcccaggagttcaagaccagcctaagcaacatagtgagacctcgtctctatgaaaaatcaaaaaattagccaggcatggtgatgggcacctacagtcccagctactactgaggctgaggcaggaggatcacttgagcccaggaggtggcggctacagtgagccaagatggcatcgttacactccagcctgggtgacagagtgagaccctgtgtcaaaaaacaaaaaacaaaacaaaaaaaacaccaacaagccaaaaaagtacacttattattgactttctgaagaaaaagcagtaataacaacaataggatattcacatttgttcagtacatactatgtgccaagtattgttctaagtatttttgttcattttctcatgtaatagtcacagcattgaaaaggtaccattatttctattttaagaggagcaagctgaaggttgcagggattaagtaacttgcagaggaatcgggactcgaacttggttctgatatctttacaactctagcttgttactctacaccaaagtgtaaaagacagtcagaagccctgggctctgttgctgactttcttaccaactggctgtgtgctcttcagcaagtcactccctgtctctgccttggttccttccttaaccactccattaaatgaggcactcaatcaacttgaatcaaagaaattacatgggctgtggggagggaaagtgtaaggtctttgatggcttgctgtgctattatcggtagtgaattttgtgaccttgacttgtcatctgctggccctaaagtatgtagtgttgatctttgtcagtcttacttcttgacctgggtgcttgattccagaaagcctcttaaagtggggctctgtatgtttctttgttgggagtggatccaggcagcaagggcccaaggttatcaagtacaagggctttgtcccagagccatctctgctatagattgtcctagctttaggttggcatgcactttctacttcagatccccagtgagtccttgttggcaaatgtggtgctttgatcttttaaaagttgaagttcagcccaagaccttgaccaaggtcaagttctccttcattcccagtgggcttaggaggagtgctttcttgtctgactgatagagacaaggaaccaagtcggcagcaaccacaagatatggcgcactgaaggactggaaattttcttgacagtttttaatgcagagatgcctagaaagaagctaccaccccacatgccaatcctccaagcaggccttgtacccagccatgggcgaaagggctgtactgagaaccaccaaatcctggcctagccaggatggtggctggtgttttccaggtaccttggtattcaaaaaagccttagaatagcagattttggttttggaggacaggggtggagcatgaaaacatgctcatagtatttatctataaccaatacaatgtttaaaatgacccgtcccattcgggaagggccgcgcaggcctaatggcccctctgcacatttcctcttgggcaaggcccaacacaagtgcaccctcctttccaccccttagtccacttgttggaacaacttgtttcagactcttcatgtcgtctaatctttctaaccatattctggaactttgactttgaccttgagttataattccaagtactaagcattacttgggagagaatgtacccccgcgactcagctggctcactcagagtggcggggtgtggtgggggtgctggcccaacagactctagtcactcatggaaaggggtctctcttctgaccatttccagacatcttcacatgatctcagtttgatttttagcttcctttttgctcttcgcttgtaatttctcaacatcagacatggctgtttacctccacgtacattactgccatgtgaaaccactctgtcctctgagagcaaataaactggctttaatgggtatgctgtcaagtaacagctaaagggttaaaagtttgagcaggcaggctggccagcaggagttagtggtgtggagtaagagggacgccagcctgtctctaaactttttggccctccccaagtacagagatgaaggaagagcctctataaatcactggagattagagaccccgttcttgccgactccacagggttgcactgcttaatgtcaaagcctcacgtattactctaacagcactccttttctttattaaatccactttgaaataaaaaaaaaatgatgatctttccagtaagggggagaaggctaaaaggatttagaaagtatctgctatgttacattacagagactaataactgtttagggagtaagtaacatttttgcaccatcttaagccataaaagcgaagagaggtataaaggtctgttccttagaatcaatttgtttgagtgtttattttgccccgtgtccttgcctccaggtttccttcaaagtgtgagcaaagcaactgggaaactgatgtgagtgctgatagccaaaaggtctgggacactaaatttttcagaaattagggtgtttacttgggttcgtgtgtgtaaagggagcatgggaagggagtgtggtggtggaaagagttctacttttatacttaaaagaaaaaatgcaaactttgtgttcctttggaggccgaaactaagcttatctccttcatctgactttaatgaagacatattttaagcagctgcacccatgtcaaatgtcatattttggctcaaaacgtccaccttctgggtgggagttttctcaaactaagaagttggtagtaattataagctaattgaggagcagtaagcagaagtctgattgtcacaaaacgtaagttaaaaattatatagatgaaaaaagagtggcatgaattggttatttgttaaagctggcagtggggtttattataccattctctctgcttatatatgtttaagatgttcataatagaaaaacaaatcagtttaaataaaatgcttagcacttactaaccaaaaataaaccaatgtgagctaaaatattaaatcaccaattatagctttttaatttatactttcagagagatctagataacgaaaaacgacagagaatttgggtgcctctaatttgtttactacccattagggcttgaagcttctttctgtttattcctttatagtcaaatgcccattacttcaacagaattgttccaggaaggtaggattccatcattaagagcccagaaaaaaaagccttgaaaatcttgggagtaaatgtggtcaagggactttttagtttgcattttttttttgagtcagagtctcgctctgttgcccaggctggagtgcagtggcgtgatctcggctcactgtgagctccgcctcccgggttcatgccattctcctgcctcagcctcccaagtagctgggactacaggtgcctgccaccacgcccggctaattttttgtatttttagtagagacggggtttcaccatgttagccaggatgatctcgatctcctgacctcataatccacccgccttggcctcccaaagcgctgggattacagacgtgagccaccgcgcccggcctagtttgcctattttagccaagcactggcgaaccaagtccattttgtgtttagggtttcacttgtttattcagcaaacatttgatgaacaactacagcctaccaggtactttgctagctattggtgatttaaacaaacaaacaaacaaaagaaacgaataacccaggctccaactctggagaaacttaccatcttaaaaggaaatatttaaaacacgattacatataaaatagcatgaaaccttaaaaataaaggccacttttaaacattactatacttgatgtggggagaggaattgagcttgctttctgtagctcccggattatgacttagagaaggattgtgagatttgagatgagctaggaactgttttcaagccaactgctagattggtatgttgtttccatttgcattttgaagtttggaaagggttcacacctttaaaatgtggttcatatttgccgggaaaaaaatggcttgttttgctgtgcttcccatccaagagctgacaagtcacagctttttattctgactaacagcttgaaggtatcacctctgcaggctcctgacacaatgaattgcggttcttcatttatggcagtttgtgcttcgtgtacactttcatgtgtttaggatggttgcccagttttaaagtagcagctcttaaaatagctggaaatggatttggagttcaggtttggttgaaagtgggctgatggtggttgtgcgtgtgtcggtgtgtgcccacttgcaagcctgtatgcacgcccgtgctgctgtgagtcagtccagagcagtttacacaggggtccactgtgatagaaaatataaggcatgtagggtgaggaggaagagggtgggaggattgcatctagtgatcctggaacagttgctcagaccagcatttagtgttttattaggagagaacaactctataaaaggaacaagaggttcaatcattatagagtggggcgacaggaggcagctgccagcatgactttgaaaacccttggagatcctagaagacttgccacatgtaacgtggagcagctgctgggatcatttaggagaaatgcagaacttggcacccacccacgccttcaggggatagattctaggatcaccccaatgttttctttagatgagttccaaccccaccccacccccactttccttgccattgaacattctcacagcagctcttgtatttttcttttttattccaggtagttttgcagagaattaagagaaaaggatagtcccctagtttgatttgaaaagaaatgaggggccgggcatggtggctcacacctgtaatcctagcactttgggaggccgaggtgggcagatcactttgagctcaggaattcgagactagcctgggcaatgtggcaaaaccccatctctactaaaaatacaaaaattagccaggcgtggtggtgggtgcctgtaatcccagctactcaggaggctgaggcatgagaatcgcttgaacccaggaggcagaggttgcagtgagccgagatcacgccatgcactccagcctgggtgacagagcgaggctccgtctcaaaaaacaagaaaaaagaaatgaggggtgaggggtcctttatgcttgggggtcaggcaggtgtggccaggttgggagaatacagagggtcccctattcttatgcccatatgtgtacttcataaacagattgccacaaccttgcaaactatcacttacatgatgtcatgcaagtaacgaagtatgtgaatttcatttttaaaaaatctgcctaggatgtctgtttttcatcaatacatacagaatatttgcaaagctgaacccttcaactttaaaaatctccaattaaatcatataaacgtaagcaataaccaatgttcaaataagccagaagaaggttatttatggggggttattcttgacaagtgtatcatttgacatatgtataaaatttttggtaaagttttctcagagtataaatgccaataactgctgaaatttggcaaccagcacatttcttctgtggactcatgttctgtaagcaagctcagagaccaccagtatgttcgtaaaaattattactgatgtaatcttgaacaggaggtggccccaacttcatttgggaacaaatggagggaaaattaaagggtagatgtggaaatagtcatagtttcatctttagaagggatattagaaatcgtgcaggttggaaatctcacttatagcttgagaaaatcctcctgcccctctactccaagagattctgataacttctctcctgccttacctccctcaccccagtttgaaaatcattctcactcttactaataggagagctgcctatcatcagatatgttgagatggtgaaaaaaaaagttaagaactgcacgtttaaccttcttggctcgtttttaagacaagactattagggcccagagaagtcccgtagaggatagcagaacaaggtcttcatattctgtcacttggaagtgacaggtatatggacccagccatttctaagacattaaatcacaaccctcatgctgttgccatatgaccagggatcagcactgtcaagtatgaaagagagaagactatggggctggtgctatgaggaactatatagggtcatatccttaagttccattatgtgcaggatctactggaaatagcacctcatttttatttttcagacagggtctcactctgtcacccaggctggagtgcagtggcacgatctcagctcacggcaacctctgccttccaggttcaagcgatcctcccacttcagcctcccaggtgtctgggactacaggtgtatgccactgcgcctggcttatttttgtattcttttggtagaggagaggtttcaccatgttggccaggctggtcttgaactcctgacctcaagggatccatcctcctcggcctcccaaagtactgggattacaggcgtgagccacagcatcatttttctgcaaagtagtttgttgtatctctagttaaatagttaagcaatagagtatttcatccttgtattttccagtctccaaaataagttattttaaaatacaataaatgtatagaacagatcccaactactgtagttaaacttataatggagttactcatcatgtttgaaaaaagccttgcaatataatatcatatgtttttattccaggcccacaaataggtggtagtactgtgatgtccctactcacgggtcctttccctctttatttgagggacaaggaacttcccaccagcctagggaaaatcatccatcctaagtatctttaaacatttgatttgattaagtcctacaaggaacaagcagagttatgctagccacagcgtggtatttggaattccttttgttattaaaaaattccatgctggttgtatgagttcaggaagcctgaggagggataagaaatagaccttttgtctagtgctattttaacacacttcttcaggtgttggtgggcaaactggccttgaaaggccttgagttcttaacatagttgagtctcaggcccaggctgggtagcagaaatgccctacctcattgagtactcttctgtttcatctcttctgtccctgtatttgtctggattctcaaaacattgtcttgtcacttaaaaacattaagacgtgctccatccagtctccattgctgggatttagtctgtatttgatgcagctggtctttgggatgagctcagtcttccccaaccatcataaggcagtttctcttgagacttctggtccattgctactcttgagatctttgccccgaagtcagccctctctgcccctatggtgccttcagtatgacaggtcagttaaacatcagctgccttagtaattcaggaaacaaagacagcctccaagcctctgatgacatcactactcaagactgtgtctggcaggaagggcttggtgtcactttatgaaggagacaagctgagaatcgcaccttctaaacagtccctgctaagtgctgaagtcttgattggagatgtgctgtcccgaggcttctctctaagcccttggagggtatgctccctaataagctgccccagagaggcagtccagacaaggaattccctttaaatggtgggtcacaacatctggaatgattgtgctggattactagggagcctgggcagcaacgcttttcatccttccttaaactttattctcaagagaagtggtttataaggagcaggtgatacgcaaagaggcgttggtgatggagacttctgctggagagcagcctggctcctggggaggatgagcagagaacccctgtctctgacactaaatgcccagcgtaatccccaaggcaaaggacagactgagagagttttgtcagatgagtagctgtctctctgtctctgccaggggaactcctttcctgtgggattgctgctgccaagagtgacagtgccttcctgatgagggttcctttgttcaggtatttacctggttatagtaaagcctatttctgataccactcaggtcaaaaaactgtcgtgttgggatgtccatggttgccgtttgaaatttctgtaggtcaggcggggcgcggtggctcatgcctgtaatcccagcactttgggaggccgaggcgggtggatcacgaggtcaggagttcaagaccagcctgaccaacatggtgaaacccccgtctctactaaaaaaaaaaaaaaaattagctgggcgtggtgatgcacatctgtaatcccagctactcaggaggctgaggcaggagaatcacttgaacctgggaggcggaggttgcagtgagccaagattgtgccattgcactccagcctgggcaacagagcaagactccgtctcaaaaaaaaaaaaaaaaagaaagaaatttccgtaggtcatcacaattttcaacacaacagttgcttagacagctcctgcatcagcccaaaagggatatgaaaagtttctttctcccctgaaaatgagtttggttttgccagtgatatttagaaaaatatttccaaaatttcttcctagcgacatagaatgtaaatgtgtatcattaccataagagacagatgtctgtttccatactctctcattcttccagtcaggttaaacaggctttacccagaggtcatatgcattctccaagttcctggtggttaccttgagttagccctaatgacaatttgatgaaacagttgctggtaaaatcagcaaaggcaactagcacgatcactatgagttgatggtcccaaaggcccatccagtgggtttgagggaacccagtggttccaaggcaggcagtaataatatttttccaaacttcaggttctctgtggagaggctgttcttcagaattctgcctctttttgaaaaaggtaattttgacgaaggtacatgaaatagagcccgaatattgacatcatctccagccaaagttctcattccccagtgtgaattctttcctgtccctcttgcagttattactatgtttttctgtaggaaaagatgtatttactagaacatatttctaccattttattggtttatttatttattcaacagaaatttattaagcaccaaccacatggcagaggaggcatcctggaaaaattattgactaaaccaagtcttgaagaatgagttgcaattagccaggcagcagcgaagagggaatagcacttgcaaagtccgtttacaagaggagacagagcacaaacaaggagctgtgtttagttcaggatggccaggacataagacataaatgcttggagttgtaggagaaataaagggctgatcatggggaggttgggtttcatggtagagagtctgaaggctttggggagtccccttggaattttaaacaaggtaatatgatcaacacgtgtttcggaaaacccacttaggctacagtgtggaaaattgattgaagtggggtgagactggatccaggaaaccgccaggtaccaattatttatcgaagtgaggagtgatgaatgccttccgtaaggtagggataggaggaatggagaggaggctccaacatgggaaaggaaattcaggggctccatgacagtcaatgcatatgggatttagaatgcaatagaaaggtgggagtctaagatgccactcaaattctggcttgataactgagtagaaagcagtaccagtcacagaggaagaggctggggatggaggagagaaggtgtgttcactttggagcatactgagttaaggagcctaaagaacagccgagagaaagggaagccaaagtcatactccttgactttttctttattggcttagactgtctggtgatctagtggtgtgtgtgtatgccgggggagggcagagatgggcacgtgaaaactctcagcatccaagagaagttcacctaaaccctcctgttatttccaaaatttgaccagatgtttaagcaaattaacaaatgattaaagcagcagtcagcggggacctagacccctgtggaaataagcaaaggggcaaaactgcagagaaagccaagcccaggtgttcttgttgaagggaggtcagtgtgatgggggtcctcagtggtcgatgggcagagtcaaaatgaagcaagctgagtctggtggagagggtgaaatcggaaatctaggaaaagtacaggtgttcgtgttcactgtgagaataacttctacctaacagctatgctctcaacggtatttttattccgtccactgttggtagcacattctacttttctctatagccaagtatttttctttctctaagggatgtcgtcccctaaaaagactgtttccaatagtatcaaacgactaccaattagtattttgttgtagcaaaatgaactagcagctgagcagctaacttgggtctccctgcagcttcatcagtagctttttgtggggccttgggcaagtcataggtttctctctggaccttagctttcttctccataaagttaaggaacctatcctagcaggtttctagagtcactttcagcatgatccttctatatttgtgttcattactggtttgaaaaggccacgagtctcacttagaatggcagcttcttctcactcaccaaagacataggcctggacatcagcaaaacacttcagtaaattgtagttcccaacacacttttatgcctagtgtgtaacagggctggaaaactgccacagagacactcactacagcccttaactcattaggggtcatttagaatgtcaggtttaaaaatcagctgtccccccaggcccctccccacccagtcagctccctagctagcctcatctagagactgcatttctcattgatcttaaaataaaaaaggaaataaaatgaaaaggactttggctctagtatgtggaaactcttccaaatgccctggtctttgtgaccatgcaaaggctggctctcttgagcatcatcactctccgtgtgagttgatcctctagctcacattctctgccctgagaataatgatgagagagatcctcgggaaggcccactgcctttccaatctacttccaaaagggagccagaatccaagcccccaaaggggacgtcccacaccctgcatcctccaccttttcagtcatccttctcacccttctctggcaacagagagttcagtgccctcaagtgtgggctgccttccagttcaaagtagtcacatgccattatttatttatttatttatttatttatttattattattattattatttgagatggagtcttgccctgtcgcctaggctggagtgcagtggcgcaatcttggctcactgcaatctctgcctcctgggttcaagcagttctcctgcctcagcctcctgagtggctgggatgagaggcaccctgcaccatacccggctactttttatatttttagtagagatgagatttcgccatggtggccaggttggtctctaactcctgactttaggtgatcctcccacctcagcctcccaaagtgctgggattacaggcatgagccaccgtgcctggcctataatttaaatgtagatagcaaaagatgagattctgagggccgggcacagtggctcacacctgtaatcccagtactttgggaggctgcggcaggtggatcacgaggtccggagattgagaccatcctggttaacacggtgaaactctgtctctactaaaaatacaaaaaattagcctggcgtggtggtgggcgcctgtagtcccagctacttgggagtctggggcaggagaatggcgtgaacctgggaggcggagcttgcagtgagctgaggttgcaccattgcactccagcctgggtgacagagcgagactccatctcaaaaaaaaaaaaaaaaaaaaaaaagaaaagaaaaaagatgggattctgagtaaacttgggataaggcgtttaaataaattcatgccaactcatagccatttcatagcattctttagagggtttggcgttcattgcccaaagaatctcattaatatttgtgctattagtgtggggcagttaatgagtatcaaaatggttgcttcacacacagctattagccagagaggtttagttgcttacctgtggtcacacagcaagtgagtgatgagccaggattaggaacaatccaggtggtaatgaaactgaaatgttttggctctgacagcatagttcagcaaaaggatgcgggtcctaggacagggagtgcagcttagcctttgagtcccattgttatcccaggagaactgtattttctactttcctgaattctattatgacaggttttaaaaaatgatttcaaatttatgtgtatgcacgtgcatgaaaatatgtggctgctcacagatacgtgtatagaagatgaaagagaaaaatggacaacttataattacagatattttcattcatctggtatccagatgatctcccttgattctgacagttttgacaaatcagtttattaaaattgtaaatgtaacccagagctgtttagtacagtactaggcagaaggtgctttctcctcacgttacattttgctgttgcattattagaagtaaatacagcttatactgaaaggacaaaacagccagccagtcttctatgagaaagatgtcacttgccacatacagtcccagttggtttcactgtcccgagaccctaaggatgttttcgtagagctttgaccttgatgaagcacagagaagtgtctggtccccatgcccgccctcctcccctttaactcctcgcctgccccttcaacttcagttttctaaagagaaaacttgctccctaagctcccagaaggcattactcaggtgacatttggggaaggaaatgatcagtagggcaagttttaatttagggcatttaaacccattgtgcttaagtaccagatttcattgcagactctttagaaaaaatgtatggcatcttgacgcagtgttcctggccaaaaaagaaaagaaaagaaaagaaaaatgtatggcagtaagtaatgccatgcgagggcaagctgggaacagtgaacactcaaacaatgagagaagaaatgtacaaaatgtggaactctctgcattagctgaaaatagggaaaagaatacctttttttccctcatcacctaccacagaaagttcagagaagtttttatttcatatctgattagcttcaattgacaatgttttctacactctgattttgttccagcagctttcctcctccctccctcttctagcctctgcccaggaatcatttgtaggcaaacacatatatttgtgacaggacatcttcatcttagtgccacagaccactggcaatctggccaagcctgcagaccctttctcagaatatttttaaataaataaagtgtgtaggaacataattaccaaaatattttaaatgcccacacatttatgatatagtaatatatgtacttatttttaacatattaactaaacagaattcatcactgctgtactttcaaagtcaaaatgtgtgtgcaccaggggtcagcaaactgcagcccacagactgttttgtaaataaagttttatcggaacatagccatgctcactcatgtacatattgtccatacctgctttcacactacagcagcagaattgaatagctggcctcatgtcatatggccctcagagtctaaaatatttgccatctggcccctttcagaaaacgtttcccaatccctggtgtaaattgcaacagtagtaatgtgcaatgaaaagactgatttcggccgggcacggtgactcacgcctgtaatcccagcactttgggaggccgaggcgggtggatcacgaggtcaggagttcgagaccagccgggccaacatactgaaaccccatctctgctggaaaaaaatacaaaaaattagctgggcgtggtggcaggtgcctgtaatcccagctactgaggaggctgggtcaggagaatcgcttgaacccgggaggtggaggttgcaatgagccgagattgcaccattgcagccggatgacagtgagagactctgtctcaaaaaaacaaaacaaaagactgatttctcttggttacagccacaggttgctaactactgttttctgcctacattataattgatataaatgcaaaatttcagttagaagttaacaaaaacataggagtgatttttttcacagtccaaattcatggaccacctgaattctattcatagatctcatggaggcctgtggaccccaggttagtaatcaccaaatgggattacagttaaaagagcctttcagcacaaatagatactttctttacagtgtaaagaatctgcaccctttccgccccctcacaaatgtctgcatattttcatatcaatgaaaaagacatcagatcatctctagaattaggtgaagcacggccactttgaacgcttattcccattctgcagagacccagtggcttgctgaggaaaggctagttctgtcagctagtcctaagaaaaagttgagattctctacacatacagtcagctcattacctcctccctgtcccactcttgccatgccaggagaaagagccaaaaactcccccctcccccgactcccagggttctcctgttctctctggtgtattacttgactttcctcatcttgtctcttaatgtcacatcagaatgtaccacggaatctgactttgccatttgtgtggctatgatgtcttattctccagagacgacttcaagtattcagcaataactcatgtccacttaatgtgaaaattggtaccatctaatagaatcttcaacatgctaaccacactattccaataatgaaatgcaaattttcctgcctttttactatggtcatttttagattcttgaggaatgaaatatcctctttattatgaattaagaactggaaattaagatgtggagtattgttacactatttttagatagtctccttatctgaagtcctaggctatcttgtttaatactgacaatataattacaaggtgcatatcattattactcccattttcttgctaaggaaactaagatttaggttacattgatgagtgacagaattctagaattcatatttttttttcagctttgaaagaacagacaaccccactttatctgatccttcatttacaatatcagctacggcctctggatgtgtttttatctaagagaatcctacagtagttcagactttgtagagaaaggcagtgagacggaacagttctggccatagggaggatgtagggtctagatcactttctaaattccttttccacgaaatacgggctttgagagagaagaccatctatctctaaggtcccttccagtgccatctgaccatccatggctctaggatattcaaagcaaaagatagttgaggcagctcaacttgtgatgagttcccctgtctgcctttcagactggccatggaagggaaaggcctgtccgacaacaggacctctgagatggacccgaagcacttcagcccttgtcctgtgtgctgagcagctctgctgatacagcaaagctgggggatagtattgattttccagataatattagcatgtcatctcattgagacagaatgaagaggatttatggggagccagagccgcacactgctgcaggaggcccagtctgtgggcatcttctgagctgcctaaaacaagaataaaatagtccctcatctatgagcgtggggaagaatgtaaacaagcacccgtgtttggggatacagcagcggcctggaacttctgaacggccagagaaacatccagtgggtgagaaggaacacatgggcttcaccgagcaattagtgctgtaggtttaatagagtttgagtactgatctaggttcagctccatcgccactcagcttccgggatggtgatttgaactgacagtattaccacctgttgttcattggactttggcactttctcctcctgctgtcatttctcattactgcccttgacttctttctagaagagtgggtacagtggggagtgaccagcccccaggaagaggacacaggtacacggcagtgtgcaccctctcttcttttgcctatttctggctctgcatggcttgagtcagagttgatatttccccatcccttttgttcccttacagcaagcacttaccgtgctgtactgtggttttctgcttacatttctgacctctttctggactgtgaagtcctgaaaagcagaggctgcaaatgcatctctgtgaccccagcaccaagtcttgtgcctggcacttagtaggtgttcagcagcatttgttggagagatagatgaagagtaggcatattgttcctagtctaacccatcccaatcatcctccactcccagcagtgccatttgtcattattttctgaatcccagtctgtaacaccaccatccaccctatcaacaaaactagaaatgggggaatcatccttacactgtctccttcctcacttcacacacaccagtcaccagttcctgctgattgtttctctctaaatagttctcaaatttgctctttatccttttcatccctattaccacccccaagttcattgcctcactgttgtaatttaattatctggtcttcccacctttactttggcctccactcacctgtcctgtgacaccactgctctggccatgtcactacccatctaaagttgttgagaggctgcatttgcccacagtaagaaactcaagcttcttagcaaggcctgcaaaacctttccttggtcaggcttctgcctgcccctgtatccacagctctgaccacttgctgccttgagttttatgttccagtgccaccagatttcttgtagttacccatattagtcatatactatttcgtgcctagagtgtccttcttgctcttgttttttccattcccattcatactcattgagactcagcacgtaacgtcacctcatctgggaagcctcgtctaaccttatttcccccatgaaaggaaggagggaggaaagaggaagggttaaggtacatctcctttggactttcatagagctctgtacacacctcaatgtccctgacacaggtagtcacctccatagtgaattgaacatccaacatgtctttgcagttccctaatacccttgaattctattttccttcccaatcctttttttttttttgaggcggagtttcgctcttgtcgcccaggttggagtgcaatgacacaatctcagctcattgcaacctccacctcccaggttcaagggattcttctgcctcagcctcctgagtagctgggattacaggcgtgcaccaccacgcccagctaattttttttgtattattagtagagatggagtttcaccatgttggccaggctggtctttaattcctgacctcaggtgatccgcccgcctcggcctcccaatgtgctgggattataggcatgagccaccatgcctggcccccagtccttttctaaagtgtttattcatattgggatagaactaacaagtaaatgtgaccttttttaggaggattaccatttgtatagggctctatccctctgaagatagaatactggccttagtcaatgaatgaagcaacatctcttggggttgccagatgaccccggtgcatagtcaatcagccaaacctctgattcagctgcttagttgggttaacagtttcctttccactagtatggtgtgaggagtgggaaaggcagcagagtaccactcacagcctgcccagtgagcccaaagcagtagtgagcccagtcagaagaaaagcctggcatactagaaagagcatggcctttgaaagattggtcagcctgggttcaaatccactgtttgcctcttcactgtgtgaacttgagcaagttcattaagctctgtcctcatctgttaaatgtgcataatcgtttacactgaattgtggtaaggattaaatgaggtcatatatgttgtctgctcagaagagccactagctcatggaaagtgaccaataatgatggctgtggctgggtgcagtggctcatgcctgtaatcccagcactctgggaggctgaggcgggcggatcacctgaggtcaggagtttgagagcagcctgggcaacatggtgaaaccccgtctctactaaaaatacaaaaattagctgggtgtggtagcgtgcggctgtaatcccagctactcaggaggctgaggcatgagaatcacttgaacctggtaggtggaggatgcagtgagctgagatcatgccactgcactccagcctgggcaacagagcaagactccatctcaaataataataataatggctgcatttgttgttgtttcccctgtcttgatcccctggtggatggtcattgtgcagtagaaacaagagataatcctgtgtgcttccttcttgtttcactgaatttggccccaagtctacctgaatgcccttaaccagagttctggaacacttctgacttaggaagcctcaaacaccctagtatgtttccagttttccaacagttgagaaaaacatgataaagccgcaaattctatatgtggaaaagcagtgcagtgtgaagaatggtgtacacctgagtcatttgttggcaacagtgtgatcttgggtacattcctttgaatctctgcatctgagctttaaagatcccatgagctatttgtatttcttcatcaacacttcgcttacaaattaaagtactttggtactataatggtgatttggttattactatttattacctagactgcaggcttaagtatagcagttagagaatagcacactttgttttgtttttaaatgaaaaaacaattccccttaagaagtggaaagtactcaatagcaccaaatattaatttttaaatataattcaagaagcctggctgagcacaccaagcttttatgcctgtaatcccagcactttgggaggctgaggtgggaggatcgcattaatgcaagagttcaagacaagtctcggcaatgtgaagaaacccagtctctacacaaagtaataaattagctgggcatggtggtacatgcttagagtagatcctactcgggaggctgaggcaggaggatcgcttgagcccaggagctcaaggctgcggtgagctgtgtgagctgtgtgagctgtgattgcaccactgcactccagcatgggtgacagagtgagactctgtctcaaaagaaaaaaaaacaaagctcttttctttaaaatatttctttgaaactaagcctagaggtactattacctttggatcactattattaatcattccttaatagaactttggatttttccccaggcttaagtacactggttatttctaattctttgtgattttcctggcttcagatctttccaggaacagctctgggtctcttggccaatttggcatcagggctctgggcctttgcccccagcttctgtgattctctcaaaggtctttcagtattgatcagggagtcattcccactgagtccttcaagttttcttttactgcttccccacaaaccgtagaatgagaaaaggatgattgaagtgaagagcctagcctagtgccggcccaagttgggacttgctgaacattggtttccagccctgtggccccagaataccccacagttacacctcagctgtgggttcctctgggactgttccccagaaggagatttttctgccagttttaatttactttttggggaacgaaaaaaactacctgtaatttttcctgtctacttttactagagtttactagaggtttcctcaagttccttgagcataatctcagagaagaatctaacccatgttttctttttcccattgcatttactacagttacaacgataataaatgttgaattaactttcactagcttttaaccaacatgtaagcactcccctttaaactgtgtcttctgtgtttggtgtctacctgtgtaaaataggaataatcccaatcttctcaatgagattttaccaaaataaattagcgttcataaataaaaggagctatataaatctgagaaactgtagagaggactctaactaattttatgtccaagtgctctaaataaaattactttttcccaagtgttctagaaagggttacattcctgagtagggtcttaatggccagttcaagaaataatcaagttaagtgtatttaattcatacttttaattcatttttttgtaataccttctgttagacacttccatatgacctgtgtcaaatgcacagcaaaacatctgatatatggttacagatctaacacaaataatgttacgtgagcaaccccaaacagtatacaccttgacaatgtggagactcaagattttccaagcactcattaaattgagcagagaagtaatctatttcatccaataacctttcgttttatgtatttagcaaatctttatcagagagagctatatgtggacctcctaaaaagggacctgggaattcgggtcagaaactagaccagccaggcgttggagttcacgcatcccagcactgtaaacaacagcatgggcacaactggccaagtgtgtggggactcctggtgttgttgtttatggcgtctggcaaatatttctacccaagccttcagctagtttacagcatttcattttacagcccatcatgatgatagtaaccaaccccagaaaaacatcaacaagcattagcagccatagtgttggaagatgaatgtgaccccagcgacctccattccaccccccaacccccatcccactcccaccccatccccctcaccgccccctctagtgttcagtgaatttctgcagctaaagtggttaccatgggtcttgggtcaaaggaggatatttggaggaatttctctaaacacatgcttacaaatgttgagaaatagcactctaaaaaagcaggagtcatacacagaccccagctcttctcggtgagtaagacaaaaggcagcgtgatctataaatatggtaaagtgccttgaaacgatgagtctgcagaggcaggggggtgggggtagttaagggaaggcaggagggagacaacaattacatattaagttgcattggttaagaacagaaaaatataacttggcatgagttcccatactggccttttagaacggattggtctgtaacaccatactaagtctgttttctatcagtgattcctagccagcttattaaacagatttatacaatgaaagaatctcataacagaaacattcaccttctttattacttggcattatttatggtttgagttttttcagctacttttttatgcactggaatctgccaacattatacttacaaagtttatgtaccaaagtataagtaggttgggagaatattatatgtgtctcctctctccagccatgtggcctcccccagcagaggctttgaggacctatctgtcccctcctctgagtgtcttcagcatggaatcctctttctttcaggagtccgtgattcttgactgaaacaagggttagttccctacctccatgcccgtcaaggagtaatacttttttcagccttgggtttagtgacagggaaaaaagaacgttagctcatgtgaggatacgtataagggaattagataactctctacgtgatttgcaaacacctcaaaattgtcaagatggaaaagagacccagagtcccctttcgtcctccccattcattctagggtaataagggctggtggagaggcggtgtccattttttgacggaactggtatgggcagatgagcatgcctgagtactgaacactaccgtgtcactccccatgttgccattctgtagaagaggaagcaggaagccaccgacaggggcataactgtggacctaaagtggacatcagaggggtcccggcaatgcggccctgacccttccctgcctcacttgccctctacttcccagcttcaccatagctgggaagaatattttgatttgtttgttttccctgagaaagaacagtttctatctcgagtattgcctcctttcctgaagcgtgttctccgtcccaaggaaaacacacacatccagaaggcactgtgagcaaagcctggaactggagagatgacccagggtctttgggattgcggaacagctgctgtggaaaagtagtggcctgtttatgggttgaggaggcagtacagggtgacaagagggagcccgagagccccccatgaatctgtctgcacccttgtgagaagaagcccatgaagtcaaatgacagcttgtttaaggaagccatgaactagcaaatgtagttaaaagatgaagggggaaaatgaagggaaacgcttatgcttaaagcagttttcctttgaaaaactacagcatttaggctaccaggttgtgtttccttaataggaagccatatcccagccatgtggcaagaattagtcattgccttccatatgggtagtaataataaatgtaggaatttagaggctaatgaatcagtgggagttgctatgggtttgctgggtgaatgaatcaaaggcgatcccttctttctccctgcttccatctttccggtcctttcctcctgctatgcttttatgcgtatgagctttcatctctggcccactaaccccaaggatcctttgaataatctggaaggagaccatctaaagaactctctggccaggtacagtggctcacgcctgtaatcccagcactctgggaggccacagcacgtggatcacctgaggtcaggagtttgagaccagcctggccaacatggagaaaccccgtctctactaaaaatacaaaaattagccaggtgtggtagtgcatgcctgtaatcccagttacctgggaggctgaggcaggagaatcccttgaacccaagaggcggaggttgcagtgagccgagatcgtgccattgcactctagcctgggcgacagagtgagactctgtctcaaaaaaaaaaaaaaaagaaagaaagaaaaaatgaactctcaaatctgtctctagcctgcatgcgaatcatcgcccagaaactaatctgtccccctgagcccaagtattaagccgagctatgaaccaaaaattagaggtatgagagacatgaaggggggcaggcctctgtgccccgccctccaagagctcaccatctagtgctagagactgatgtgtaaacagatcatcatagtgataaaaaccgtgatagaaaaaggatgaccagttgttttggcctgtgtgtgtaggggaggctctgggaggcaggtagaatgccgatgaggatcttctatgacatgagtggctgttgagctcaggagataagaatttggagctggagcagttcacttccattttaaatcccagccctgtctcttaatagttgtgtcactttgagcaagttacttacctctctgtgcctcggttttttcatgtgtaaaatagtatacctacatcctcgggttcctgtgagaattcagtgagttaatatgtgtggaacacttaaaatactgcctgctcctaaaattactgcttggcagtaaatgctatgtagatgttactttaaaattattactattttcacatatcttatgtgaatgtgcctaaatgtgatatgtatatatttttccttttaaaaatttgagatcatactatacagagagtccagcttactttccatatcagcacatgtagatgtaccttaagacattaatttaaaaccaactttcttttgaaaaactttccagcctcatcagacattggggattctatgtgagggcacctctccaagattggatcttgctgtggttgatggagttacatccttcacagcacggtccaaattagagatctccagtcaggctgtttggtctgtgaaacatttggatatttgttttttaaatccatattaggacatgttattcagtgtttggagaaattagtatgtactaatttctaggctgcttgaagaacttggggggtaaattgttgctcttaaatccccttaaaatatagggcagaggccaggcgcggtggctcacgcctgtaatcccagcactttgggaggccgaggcgggcagataacgaggtcaggagatcgagaccatcctggccaacacagtgaaaccctgtctctactaaaaatacaaaaaattagctgggcatggtggcgggcgcctgtagtcccagctactcaggaggctgaggcaggagaatctcttgaacctgggaggcggaggttgcagtgggttgagatcacgctactgcactccagcctgggtgacagagcgagactccatctcaaaaaaaagcatatatatatatgacagaaaggatcttggcaccctgtgttgaaaagatacgtttttaagtcaaatgtgaggtaagtaggtcatgccacatctcaacctcatcaggctgtacttctgcagattgttgtggcttctgggtgtcctattagaaacaaaacaggaggggagaatcgtttgatctcttgctcctaaaatgtgggccctaggccgtcagtaagaggtactggcccttgccgagtcccagtgttctccctcattcaccccctaggtgacagtggatccaactctccataagcaagtctgggattctgcatgttgtgcttatttgctctctgtgggagggtctgttagacaggtctctccaaggaaggggaagggagcaaggagtgggggagggtgtcagctcagaggggctagcaagtccagtagatgccagttctcccgaaagacaggtcccctgtgtgattcacatctggtactgaagtggctagagcagttggcacaccgcaaattgacactgaccttggccatgctgttggggtaattggactttcaggatggactctccgaacaatcttgccactgtggctggcacaaacaggcttttctttaacagcagacgttcatgtcttcttgctccaacttttttttcttgaacaaacatatgtattgtggccaatgcaaggaaaatcccactcaccattttgatctgagttgcttctgtcctggaacaatagtctagtgtaccaggggccctcgggatgctggtttccatgccctggtctagttttatgaatctccttggaagaccctaaaggccaggaagccatcggtatttctgcagggcctcctaccaccatcggggacatcagtggctctgtatctgattgtcagagcgtgagcttcagcagtagcctcggggtcaggactggttacaaccaaagagctttctaagtgcctgccctttctcccacaagatggcctcttcacaacttaagtgggcataaccgaagacttgcattcccctttgagcatccacctcactcagttagaagaaatgtgtctccaagcactgccagcctgtgaataagcacttcccaagtgccaggtacaaagttagacacttcccatctttcacctcgttgatcgcctcaaaatcccgtgaggtttttaatcactgactcagtagcattgattgagaaatctactccgtgttaggcttagactacatagtgatgaccaaaacagtctttggattcatggcaattactgccaggtagagaaagcgaatgctgttattttgctctaagaggaaactaaggttcaaagaaccaatactttctcaatgccatataactggtaaagggtgtggccacgattacaccaccatgattctactccaaagactgtcttccctccaccatgccctactaccttcctataggaagcttaatctgcggttctacttaaaatatgaggaaacatctggaatattagttttcaaccacatttcagacacagaaagtggagcctaaggaatagcccagttggctcctctctgagagcgggtaagagtagaaaagaattgctgatctcaagcattttgttaccagaataaccccacaggagaggcctggctgaacggggatttgtgtgggccagacaatgtaggggatttatttccaaggctggaggacagagcttggactcgggtccagctcggcgtcctccctcgggtcctgctcgctgaagaggtacagcatctggaggaggactttccggccagggtacagctcctctaggctgaggcagttaacgattaaacaagaagcagcctttggctacaaagctaatggtttgggttccagggcacaggataaaaatatacaactggaaaggcaagctcccaattaagtggaagagctcaagcaagagatgtttcaatgccgcggagccagtgaccacacgtgggcctgctgtctcctccaccagccccactcgcccggccccatacttagtgctggctccagagtctcgtgggggaagccggctggcagcacacaggccattcctcttttccattcaaagaaaatcttacttgccttctgcccaacaatttatcttgcttggcatcttaggatagtagaatgtcagaactggaagggccttagggatcatctagcctagtccagctccctggtttgatgctttagaaaccgaggcacacactggggaagtgacttgagcagagtcaccttgtcagttcgtggcagggaggagattcacgttttgatcttgtaatgtccgcattctcttctccctttgtactaagctggcaccattagcagcctgccatttgcacctcttccctttgctcccacaaacctaaaagccctcggtccttctcctcttttacaggaaaagatactgaggcagggagtgtaaacagtgcccacagagctgacaagtacagatgccagaaagggaaccgcagaatcccgcccagcaggcctgggccttcaccatctgaccgcattccctctctaagaacatgttgtgggagaactgaatttggcctcctttgagctctaagcctgcaacagccctcctaatgactctacagttcctggcttcctcttgccactgactttcccctccaccgctgcctgggacaaccttacagctacagtgactttgagtcttgccaagacaagcccaatagttactttcagactcaagtgcttgccaagcctgaaatagtaattgcctgaagggttccaaaaagctgggctttatctgcagcagagactttagtaaatcaaaacacaggtcttatctccctattctctcccctctgttgtgtggtctcctaaatgaaaaatgttacctaattgcctaaaacagctggcttgatgtttaattacttcagcttgctaacctgatattctggaccaataaactatacacagggagtggataatgctctttacagatcggacttgtccaggtttcctttgtgagaaatgttgatttcagccaccagagggaattccaaatttgaatgctcttagcagtcaccgcgcttgtctgatgttggaactcctcttcacccatccgaggaacagtgtgcctggaaaatgccttgaatcctctccccagcattccaggggcagtctcctccacacgccacactgctcagcctacactcccttttctttttctttttttcgcgagacagattctcgctctgtcacctaggctggagtgcagtggcgtgatctcggctcactgcagcctccgcctccaggttaaagcaattctcgtgtctcagcctcccaagtagctgggattataggcgcccaccaccacacccggctaatttttgtatttttagtagagacagggtttcaccatgttggcctggatggatggtctcaaactcctgacctcaggtgatccggccgcctcagcctcccaaagtgctgggattacaggtgtgagccaccgcgcccagccaacgcactcctgttctgagacacgggagggcatgcagagcagtctcggagcggacgctagctggcagcggtgccattgctttcgcctcaggcttcctagagcaaagaagcccatggaagaggttgcacagcgtcgctggttaatggcaaagcccaggtatgggccagtgaaccccaatgatgctggggtgcctcttcctgtccccaaggactctacagcctcagcctcacccatcgatgcttccccatgtgggtcctggaatgtgaccaggctgactgaccccccgtttcatgccccacgcctttgctggtactggtccctgagatgtcccctgacatgcccctcacccagcacctctgccctcccatctgcctccacatgccgctgcgtcccctccacggctcccctgcagtagcacacctctgcacagctttcctctttactcctagccaggctcagagggacccacagctgacatcttaaagtcacctctattgtccacctacctacttctctatctcactgaacctctttaggaccaggattttcccttttcatgtgtgttttccagtgtctaggatagtgaccatctatagcaggtgctggccaggcgtggtggctcacacctttgatcccagcattttgggaagtcgaggcaggtggatcacctgaggtcaggagttcgaaaccagcctggccaacatggcgaaacccccatctctactaaaaattacaaaattagccaggcatggtggtgcatgcctgtgatcccagctactcaggaggctgtggcaggagaatcacctgagtccaggaggtggaggctgcagtgagccgggatcacgccactgcactccagcctgggtgatagagtgagactccatctcaataataataatattaatagtaatatagcaggtacttagtaaatgtgtgctgaatgtgggagacgtcttttttaaggaaagcctaagatgtcattcttagagcagcagaagagatgatgttcatgccccatgcctttgttggtactggtccctgagatgtccccggacatgcccctcacccagcacctctgccctcctatttgcctccacatgccgccgcgtcccttccacagctcccctgcagtagcacccctctgcacagctttcctcttcgctgctaggcagactcagaggggcctgcagctggtatctgataaaataaaggaaaggttagagggagggagagagggaaggagaaggaggataaaataaaaggaaaagaagaggtatgaattctttggaaaagaaatccatgccctcggaatgatgtggctccttccttttttagtcaaacatctgctcaactgtatgtgctgtgctagattcctcggggtcatgtacaataattcctgccatgtaggtttattaaattaacagttgcaatttatgtttagcggtttccccactaaggaattcctcgtgtatttgatcgatttgtgcaagaggctaactccagccattgccagcccttctgtaaaatggctactatatgatccagaattccctctcacctcagacactgatggtactattagagttcgggaggcttcaacagttctgagataggtgtagcatatacaaaaattccgttcactgctttgttttcttaaaaaagtttagggttctaaagagtagtgtcttctatccaaatttagtatacttatatattatatccatcatattatatttagctcttatgccctaggtatttgatcaatttgagcatttcattgccaagcttttaagagactcctgctccacgtcttcttgctgtcctcactagcttgagacaaagtagaaaggccagagagaggggactcctccagagcccacccaggacacacaatatacagtatgatagaataaaacaatgtaaaggcatgcttcttaaataacaggtcatatgctttaattatttcatctactggcagtgtattgcctttactgggaaacaagcctttcccacacacctgctttgtagggctgggctgagtcaagccgggagaaccagacagttcctggtgtttggggcctggaccaggaaaatgcagctcatggcaacatggagggcttcattgacggtgaggtgaggtcactctaggagagggctcggcgtagagacctgggtcagtggggtagtagcaccatcaggggcaactggcagtgaggcctcaatagcaccttgagaattcagcgagacaagaccgatttgggtggggtgggagagtagtagttggcaaggtaagtagggcacagttgttcctaagaactaaagcccatcaaggcaagggcccaatacccagattggggaacttgacctcagggataggacagaagcctagtaattagagcagagacacggtgtcagagccagccaagggccctgccatgggaggcctgatgtggaatctcctcccttttagccacctgagggcagacttgaacagaggtccctggtgaggtctgtgggtgggggtccaggcagagcctgaacgaatgccatacgcaagctgttctggcaggcgtaacgcgtaggaccaacagtgaaagcacagcaagaacagggtttgtgctgcaggtgtccaggctgtgcaggaagcagggccagaggccgcctctcctgctagagctacatgccgctcctcggctcctccccgccaccatcacaccaggagtcagggccctgggaggcgactagaacacaccaaaaaaggatggctaggactatttctctgcaaggtggaatcagctcttcatttaagatataagctgtggcccaaagttactgagggttctacaggtgacgtccatctaggcaggaatagaagttccaaaattaactgacttttctcagttggaaactttcttctcaggctccagaatctgcagtgtcctgtctgcactccttggtggcgatggagcagcagccctctcctgtcttccctgcctactgttagaaccaaatgtagtctttcttgaagacggcaccatctccctctcccagtgacatcagcagcccctcttccccctccccctaattgacaaatgtgggcatttccaagtgtcttaatggcattaacaagggacacaccgcttaatcacaggtggaactgccaacagatgacgggttatttcccgtgtttctccccaccctgcagtgaggcagcagccttgtgttggggtttctgaagagcactcctgctcggaggacatgtgctatttccagccagagttgtccacctgcaactttctgctagggttagcagtttcatctcccattattaagagtccagctggcgtgtctttgaagttggtcccatcatgttaaatgttaactgtaatttctcttggcccttgctggagagtgctttccttcccgttggtatgataatagccgcagctatattggccatgtgctagctgaccacctcagcaattgctttcactcccggagtgacatagaaggagctttgtactgtgcatcgtgaaacttggggtttgacctggttctgccaggaagccatgtgatcttgagcaagctcattctcttttctgatcctcatttttctgctctgtacaattctgggtaagggctagaggatttctaaagcccttccacttccaaatctgtgattccaagattgggagaatgcacagttactcgcaactcctttttctccctctaccccgggcctacacccctcgctacagtgcttctccacatgctgatcccagtaggtagccagggtcagagaatactaacaatatgtagagagctcaggatcattctgaccctttgaacttgaaatcctcagagagctttctattctaataaaagggcataatcttggtgatatgacaccccctacattaaactccattatattaaggaaaccttagaactcggatgtacaatctagcttgataatttacaattctgctgggattagtatgaggaataattatatctatttattccactgtcagaatgttgactctagaatttcatattgtctctgtcactgaagattataattaaataatatgtcgaatgtattgatcatatttttatacatttgcttgatatgctatagaggctttttttttttcaatatatcacgagattaaattcaaaagtttgccaggccatctaggtctgtttaagagattttttttttcctgaataaaccacaattttttgatggcttgtcattttgacatcaactaaagtaatttatttactccttagtgcagaactgtatctcttttagcctttagtcagactcagtagctatcatgacattagaataagaagtagtatgtgtctttgagggtaggctttaaatttcctttgtgcataaactcacaattttcatagaatagtcttttttctttttctttctttcttcttcttcttttttttattttttattttttttttttgagatagagtcttgctctgtcacccaggctggagtgtagtggcacagtctcggctcactgcaacctctgcctcctgggttcaagcattctcctacctcagcctcccgagcagctgggattacaggctcgtgccgccacacccagctaatttttctatttttagtagagacagggttttgctatgtttgccaggctggtctcgaagtcctgccctcaggtgatcctcccgcctcggcctcccaaagtgctgggattacaggtgtgagccacggcacctggccagaatagtcttttttctatgcatttattatgagaacttttccagtggaatttgaactcaagtctcttttactccaaagcccagtttttccttctgcatcagatggtccattcctagacagtggcactatgaaccaaaagacctgggttcctcactcatctcttggactcttagctaaggaatatatggtgaaagaatatattcaactgaaggccaggcgccgtggctcacgcctgtaatcccagcactttggaaggtagaggcggacagattacgaggtcaggagatcgagaccatcctagctaacacggtgaaaccccatctctactaaaaatacaaaaaaattagccaggtgtggtggcgggcgcctgtacctgcttgggaggctgaggcaggagaacggcatgaacccgggaggcggagcttgcagtgagccgagattgcgccactgcactccagcctgggcgacagagcgagactctgtctcaaaaaaaaaaaaaaagaatacattcaactacaaattttctcagcctatttctcttttgcttgagtcacaaaacattcacctactttacccagagggtataattaaaccttttctaatacttgctttggatgtatgtttcatatatattcttaagtagtgtagagggtttcttcagtctgcccgaaacacatgtaatcagctcttcagtcacagtaataatatagcacgtgtgtaatgttttacaaagggctttcatatacattatctcagatgagcattaaagcatgctgtgatataggcaaggattattactattagttcatttaatggattctttttaaaaagactcagagaatttaagattttccataacatccagctaagaaataataaagctgagactagaactcatgtcttctgaatccttaatctagggtcttttggccttctttttttttctaatgagatttacaaacataactaaaaatatatctccagcttcccttacctcttcatttgtttaaggcagattcttcattttgctgtaacatcccatcctctgaatagatatggcatgaaataaagtggtagcacctttttaacccaagtaaggacagagcgttagcaaaagaagaaagatcctgattatatttgactgagagactcgcattccttctaccccacctcccatctcccttcaccattcatactgtggcttcttggggaagctcatgacctgtttcaaagagcttgattgtagtcctgggccatgaggaaatgcatgagcaaaagcagcaatggtgagtggctgatgacctcaagaagaggccatttgatgtcgggcggtaagaggctgtggtcaggaagcactttcctccctgggccatctggatgcccctgcaggccgccaggctgcttgtgcccttatcccttcaccctcagggaaccttgctttgttgactgacagttgggttggcatttggtctttatcatcagggattcttcacaatagtgcaagccctaggaaggcgagccagcaaatcgttctagtctctgagaacaacgctgacctagtgctctccaatctggccatgcttctgctgggaaatgaggggatagtggggagaaccctggagggctggattttaatccttgtagtctgtttgaacttgggcaagttattgatctctgagcttcagcttagttcctttttaagtaaattgtggatactaacacctatcccgttttttgtttgtttgtttgtttgttttttttgagacggagtttccctcttgttgcccaggctggagtgcagtggcacaatctcagctcaccgcaacttccgcctcccaggttcaagcaattctcctgcctcagcctcccgagtagctgggattacaggcatgcaccaccacgcctggctactttttgtatttttagtagagacagggtttctccatgttggtcaggctggtctcgaactcccaacctcaggtgatctgcctgcctcagcctcccaaagtgctgagattacaggtgtgagccaccacacccggccccacttatttcctcagattagtattgggaggcgtgagtgacctcatgtgtaaaggtgctttgctcaaatgcaggggacctgctctgaaggaaggggctaggctctgggagactgttttaggggacctgtcaaactgagcagtttttaagatcagaaagaattgttttctcccctcacccttggtgaggaccagcattgcctgccagggttacacccatccctccaagccttccgccctcctctaagaagtgagattgtaactcagccactattgggctgtgacatttcttcgcctctgaggcacagccaagaacatggcctcactctccctcccacccctctttcctttttcctccctttctcctgccttctcttcatttcaaacaagtgagttgtgttagttggttttttaatgaggtttttccagcctcttgtttttttgtccttgacaataaagaactcccagttacccaaagctgaaaataaaatttggcagaagtaagccaaaagtatagtctcattggtgttgatatttttaagcctctcttgagagagagagacagagagagagagagagagagagagagagagagagacagagagagagagagagagagagagacagagagagagagagagagagagaggtggtggggggtcctctgggagacaggggcaaatcgtcatggaataagaatctgtttgagcaccctggggtgaggactttatatctttttctgaaaacaaggcgccttcctttttttttaaaggcgtgttgtggctattttgatgccttttgaaagtgccacagttaatttgattgagctgctaagcagttggtttaaaaaaaaaatgaaagaaaaaggagaatggtcacatggatttagcatcacacggggaattcgctgtaacccagccatcttttaggcagctgatgaccacgggccagattgttcatttcacaaaggggaggcttttaaaaatgagaagacttttgtctagagcccaaacttccccagggggaaggactcatttataacccgttctgattattcttctcctctgaaatctcactggttgaatatgaatttatgtggagcactcagctacaacatggaaataagtagtgcagtgagcagttagcataagggagttccagccccgggttctagtctcagctttgaccctccctggtaagctgtataatcacaggagtggccctgaacggacttaggatttggttttctactctgtgaactgaagctaatttctcctacctgggaggattgatatggaagagaaaagttgttgataatgtaaaaatgctttgagaaatatcttagctgttctcaaaattataaactcgggagtgtggagggggttggtgaatttggggagaaattggtgaccaagggtctccagttccttcctccatatggcatctctgtcaaaagttgagcctctgtttccttaataggccacttccctccaaggattcagggaccattcatcaccgtggtgcctagtccccaggaggtcagtggcctgctgcggtgctcagctgctggtaagtgatccagcagaagcaggcagccctggcttatccatggccccctggcccctgtgtgggttccttggctccgtgtttctcgtctttcccagacgcttcttcccttcttgtttgcacattcttcctggaggaaaatgatagctcattgtcaaaggttgggcgggagacgaggtaagaactgttagtgtctgtgagatgtttggggatttccagctggaatcctcacacttctttggctggagccgccttcctctgtgttctcagtgtgctcttgtaaccctctgctagatcacttagcacatgggacatactgggactcttcccatcaggctgcaaactcctccagaggcagggaccccatccttctgattctctgtatccccagtgccagacatatgctaagcactcgagaaatgtttcaatcagtgagtgaattagaggcgggagagaccctacctcctttatcatacacattgatgaaactgaagcctagagctaatatgtgaggtgatcacacagaggatactagaactaggattagactaaggcagagattcacccatttgacccctgcaaggctgatcactgtcagggcagggcagggagaggctgccccgagtatgtgtggtagtattaatatatgtacatgtaatatttgtgtgcgtttaatcccagttctagtatatcctgactatggtatatctatatatatcctgaccccgggttggctgtgtgttaaaaaatcaaactgaaatcgcctccaaaaggaaggcagcactgaatgacagtaaagtaagggctgggcctggggtcagcagcctggcgtccagccctgccagccactagctgtttgaccttggctgagtcatttcctctccctcatctcatttgccttgtttataaaatggtatccagccaggcacggtagctcacttctataatctcagaaggcgggaggatcagttgagctcaggagttcaagaccagcctgggcaacctagtgagacctcatctctatgaaaaaaaaaaaaaaagaagaaacaaaaaagaagatgtagactgtgtgatctctgaaatttctccatgttcaaaagtctaaccttcgaagacttctaagagttttagaagaaaagtttgagctgctagaggagaaagaggaaacagtttaaaaattaagttagagagttcttgcaaaggagatgtttttgttagagacactgaaaattcttctcttaaaaccatttccactagaggccatcccaccatgcacagttagcctgggctttaaaaccccgctccctccactgccaaatgagttgctgatgggaattttttgaatgtttgactctgtgtctctgtggaccacaacaggaccacaggctgttacacagttagcatttaacttacattatgaagtgacagaatcgcacttgtgtggctgatagagaccattgcaagtaactaacaaccgtacaaatagcgccctgaccttttcatatctgtggggcctgattctcaacctccatcctgtcctgcacatactcggcgtggcctctccccaccctgccctgaacagttattagggctcacagggcttgcagggtgaccctctgctccagggatatgggcactgcctggagggtggtgagcctttcctgggaagacctgcactggctctccctgagggctttccataccaattcattcttggtcagtggcaggcacatttcacactgaattccaccccatggggctgtgtctaattggacaaatttgaacagcaggcagcacagccactgccgcagggagcattgatatatggcccaagcaagggactaaaatcttaaagtgacagggccccgttttcaaagaataactggctggcttccaggagtaacaggcctgatgatgaccagcaggagagagatgggccaactccacaaagcaggggcttttttagggaggtgtttttgaaatgagtgtctccatttttcctggtcttggtggcaagataaacaggatagggtggtccctggggacagtcatctgggacccagtcatgctgaatgtttctctcactagagactcactgtatctgtatccagattaaatctggctaatatatactgcagggaagcctcggcagagaacagagtgaaaaatcgtgttgtcatacattactaagcacccaccattcatttgtttggcatccatcaaatctctataaatgctaactgtgtgtgctattaaatgcgcactgcccggacacagtggagcttgtgaagtttgtggtctaggaggggaaaagacattaatcagataatctcacaaattaacataattacaaattgtgtgaagtataatgaaggaaaaattccatgtggtatgagagcatctgaaaagggtatgcagggagagtttccctaaggaggtcccatttaagcttggctctaatgggtgagataaatcagcaaagggagtaagaggggaagaggaaaaagaaatgcttaaggagttgaaagagggcctgggtggctggagctcagcacctaagcgggacaatagcctggggtgactgtggggtcttgctgctcatgtggactttagttttatcctaaatgagaagcatgttttcagcagagggtgagttttgaaaagatcactctgaccttactgtggaagacaggagactgttagagaagtcgagtagaacatgatggaatggattaggctggcccagtagcaaatagaagtggacagtaatgagtgttatttaggaggtagattccacagggctttgttacggagtggacatgggtgggtggagaggaagagatgttaaggatgctccccagttttctggcttacttcactcatttgatgtcattcactaagagctcctagtcacatggaggaggaggcttggatacattacatttccagtggatttgaagatgttaaatctacagtcagatctatgggtcttcagcacagaagaggtgtttggtctaggggtttccttaggaaagaatggggagagaagaatgggaggtgataaaaagatggattggacaccatctctccctttaggcaactcaaaatctatttgtatttgttgttagaggaagaaaagaaaaaagaaataacaaatagtagaaggaaaaatatttttaaaggaaatataaaagggcaataaaatttttaattaaaaaacaaaacaggccgggcgcggtggctcacacctgtaatcccagcactttgggaggccgaggtaggcagatcatgaggtcaagagattgagaccacctggccaacatggtgaaacctcatctctactaaaaatacaaaaattagctgggtgtggtggcgggcgcctgtagtcccagctactagggaggctgaggcaggagatcacttgaactcaggaggtagaggttgcagtgagccaagattgcaccattgcacttcagcctggcaacagagtgaaactccgtctcaaaaataaaataaaataaaaataaaaataaacaaacgtttaaaaaatcaattttagaggcaattggactacagagtcaaggagacatttacaagttaatataataaatgtaaatgtttatgacatcatagaattgtaatgagactatattgagggttagataacaggcaagtatgtggagatgagggagcaaatagaaaatgaagcaaaatttttttttttttagacagagtctcactctgtcacccaggctggagagtagtgtagtgtcacagtcttggcttactgcaacctccgcctcccgggttcaagacattctcctgcctcagcctcccgagtagctgggattacaggcatgtaccaccaaaccccactaatttttgtatttttggtagagatggggtttcaccatgttggccaggcaggtctcgaacttctggcctcaagtggtccagctgcctcagcctcccaaagtggtggaattacaggcatgagccactgcgccctgcccaagatctgactgaataacacaaaggtgacatccagttcaaggaacttagtggtaggtgtgactttaaggtttgcaatggttgatcagacactgttggtgtaaattggtgcaccctttttggaaggcagtttggtagtaaccattatacattaatagtttattctttttcacccagcaatttattttctaggaatttattccacaaaaatataggtaaaattattaaggtatagacaaaagcactgttgtaacggcaaaggaaaaaaaatgaaataatttaattattggtctgcagagagagtaacaataaattttagtatgcacatatcgtggaataacctatagctttaaaaaaaaaaccttaataacatttttaagttttaaaaaagcaggtgaaaaacaatgtgtataatatgatcctatagagaaagaaaaaactagtagaagcataaagctccattaacagtgcttgtctctggggaagtaaacaacaaaaacaaacagggaattctcactctgttttgtggttttatatagttaaaatagtttacaattaccattgtcagttaattcagactgctataacagaataccatagactaggtggcttaaacaacaggaagtttatttctcacagttctggaagccaaagtccaagatcaaagtgccagcaagcctgggcacagtggctcacacctgtaatcccaacgctttgtgaggccgaggctggcggatcacttgagcccaggagttcaagaccagcctggcaacatggcgaaactccgtctctacaaaaaatataaaattagccaggtgtggtggtgtgcgcctgtagtcccagctactcaggaggctgaagtgggaggatcacctgagccaggggtggtcaaggctgcagtgagccctgattgtgctgctgcactccagcctggatgacagagtgagatcctgtctcaaaaaacaagacaacaaaaacaaaatgccagcacatctggtgtgtgctgaggacccactccctggtttacaggtagccatcgtctttctgtgccttcacatggcagagcatgaagacgcaggctcttttttttttttttttttttttgagacggagtcttgctctgtcgcccaggctggagtgcagtggtgcaatctcagctcaccgcaacctccgcctcctgggttcaagcaattctcctgcctcagcctcccgaatagctgggactacaggtgcccaccaccacgcccggctagttttttgtatttttagtagagatggggtttcaccatgttggccaggctggtcttgaactcctgacctcaggtgatcagcccgcctcggcctcccaaagtgctgggattacaggcgcctggccaaagcaggctctttttctaagggcaccgatcctatcatgagtactccacccttgtgaccaaatgtgccccaccgccaaataccaaaacatcaggggttagggttaatataaactttgggaggacacaaacatccaggccatgttattattattattattatttttttttttttttgagacggagtctcgctctgtcgcccaggccggagtgcagtggcgcgatctcggctcactgcaagctccgcctcccgagttcacgccattctcctgcctcagccccccaagtaactgggactacaggcgcccgccaccacgcccggctaattttttgtattttttagtagagacggggtttcaccgtgttagccaggatggtctcgatctcctgatcttgtgatccaccggcctcggcctcccaaagtgctgggattacaggcgtgagccaccatgcccggcctatgttgttatttttctaatcagaaataatagtaaagacttttgaagagaacagaagtgagagggcaggaatggtgactgactatggaatagctccgggtgagggtgaggaggaggaaaaggggttccatcctacgttcgtcctcggcgctcacctcctccaagcttacctgcagggctttgctgcacttatccatgaagaccgcaagacgccgcttacctgctcagtcttcgagcagctgtccctgattatgaagttcagagtggctgtttaacgagcatttagtgagaatttccttttagcagacactgttaggcgctagaaatataaaaatgaagaagacaccgtccctgccctaacagaacttattgttgagggggagaaattgccaagtaaaccaatgttgcagtacagaatttagtctagatgcccggaggtctcttctgagttgaaaagccttcaattcactgaagatggtctctgaaatttctagttcttttcataggctgagagaagggctaagagtaggttttttatttcttcgtttcttcctaccttccttcccttcccttttctctccacctcttctctcccctccctccctccctccctcccttcctttctttctctcttgagacctggtcttgctctgtcacccaggctggagtagtacagtggcgcaatcacggctcactgcagcctcaaactcctggccttaagtgatcctctggcctcagcctcccaaagcactgggattacaggcatgagccaccatgcccagccagtagtttctcactttcccaagtgttcactttgaattggcctgggcccccaaatgcaggccttcattccctgggcagcaggacattcttctcagtggaaggttttatgaaagaggtcagcatgtgcctctgcggccagtggactaagtccatgatgaagctgagactcacattcccacgctatagactccatagcttctcagacctccacagccacaggcccccaggagtccccctgcccatctggctattcctcagaaacacacaccagtgagcacacaggggacacctgaagtgcacagaggactccggcagcaatggccagggaatgaggagacccgagttctaatcccagcactatcactgtactccatagcatgactgggaacaagtaactttctttccctgggcttcagtttcctcatttgcagaatcagccaatggtggtgaatggtctctgccagcgttgacatcctgtaatcattgtcattgtgtgacagttctgccatctctctactaggtcaggtgaaaccacctcccaaagggcctctctgggcggtgagtgtgcactagcacagtgccaggggagctgttgaacaaatgcaactccttgttgaaaactactataggtgctttccgtaggggtgagaaaagcatataagaccatgtcctgcgttctgggagcttccaattttcccagaaaggtcagagaaatacacatgaaacagatgaaacagtagcagccctagaagcctcagcacacaggggtaggggatggagaagatgggggctagagtgggaggggggctttttggctggacagttgccaaaggttcctgctgatcttcagagtttttcctttcacaaagcatgtgacaagtgctttgccttgtttcattctgggacgttctgttctctggatctgtttctgacaggatatgatcactggagcttccaaaatttctttgggagtggggagagggttggcaagcagccagatgcccctgtcgctttatttggcacaggaggaggtcaccaggttcaagcccagaactagttcaaaactttagcctcaaggaaaaggtccaggccaggcacagtggctcatgcctgtaatctcagcactttgggaggctgaagtgggaggatcacttgagcataggagttcaagacccccctggacaacagggtgagaccccatctctatttttaagtttttatttttaatttcttttaaatggaaggaaaaaaagaaaaaggttcaaataatataatccttcctacatcccactcctagcagtgtgggaaagtgaaaggagaattcttgtgacgagaactcatgaacacagaacaaatttgtgtcactccagtcgagcgtggcttctcagtgtgtactcagcacgtggcaggtgtgattgttggcctgaggtgatgacctgcctgaatcctcagcccatcaccagggctggcaagagctttatctgcccataactgagcccatgatgggctcgagtggtatgcttttttggggtttgtaccaaaccggcctttttccctgtttcatcctgtgctggtctgtctcttttgcatgtttgggctaatcttctccatatgcgtgtctggtttggcatgtgggtctcgacctcccatgagcagggcgaggctgcctcagacaagtgcagagagttgccacccagcccgccgggctctggagctgggccacgggctcctctctctggaaaggctctgcagagagacacctggatggcttctcttctatgtttcggggacatgagaagaaggcattcttagaacagatactgcctggtgacccacctaaaacagtcttactaggacagcaggcttaaggtatgcccagcgctcagacacctagtcatccaggccctgaacatcctgctctgactacagcgtcccctcccctccctccaccatccgagaggtcagcttccttcaccatgggagcccctgcttgccatgtttgtgaggggcaaacacttcactggttggtagggcttatggctccatattgaaaggagggaaacaatttgacagcaagaaaagaatctcctaaagagactgttgcagttttacagagttctttccaactgattgcctctgctaatctctatactaccctgtgacataggaattattatccccatcttttattattatttttttttattttttgagatagagtcttgctctgtcacccaggctggagtgcaatggcatgatctcggctcatagcagcctccacctcccaggttcaagccattctcctgcctcagcttcctgaatagctgggattataggcgtctgccaccacgcctggctaatttttgtatttttaggagagacggggtttcaccatgttagccaggctggtctcaaactcctgacctcaggtgatctgcccgccttggcctcccaaagtgctgggattataggcgtgagccatggcacccggcctatccccatcttaaaaaggaggcagctaaggctcagagaagtcatattacaagtctagggcagagcggggactatattctggcttcctgactctgagttcagtaacctttctagaatactgccctccctaaacctacactgctgcagcctggaggttccacaagccctttctcatagaccccagcaaggtgctttctccctggaccccactcacacctatttctggacctttattggcaggtgggtcagagaggacacctgtgtgatcagagaaacaaagtctggtgagaggagcaagtgcagttatgcacagggagcagctggtccctcagaccttgccagccacttctgcggtggttgtcggtcttggaaaagctccatcttcagaggggtttgtgcccagcagctgatctctgcctgtaatcttcagagggcaccagttcttaccagacaatagctgtctatgacctcaagccaggcctaggacaaagtggagacgtcctgtgaggcaggcaggcctctgtctcagcatcaccaatagctcaccctcctgtccactcacattgtggcgcccccgacccttgccaatcccgtgcaaaccacgcaatgtctgccagcgctcactgccttcctgagcccaacagcccctttcttgcccactaaactagcactagagctttatcaagttcttgaaactttctttttttttctttttttttttttgagacagagtctcgctctgtcgcctaggctggagtgcagtggtgcgatctcggctcactgcaacctctgcctcccaggttcaagcgattctcctgcctcagcctcccgagtagctgggattacaggggcacactaccacacccagctcatttttatattttcagtaaaatggggtttcaccatgttggccaagccggtctcaaactccttacctcaagtgatccgcccatctcggcctcccaaagtgctgggattacaggcatgagccatggtaccctgccaagttcttgaacctttctggtcatttgcttccctgattgagagatgagtcagcattcatatattcattcattcattcattcagatattaattcaacatataatttgatgagtccctaagagagccctagagactcagaaaggtaatcagacacaatctcagccctgcaggtcttcacagcctagcaagggagacagatatgtagacagatgatcatgatacagtagaagtatcaacaaagagcttctgagctcatgtcaaagccatctcccttgaacacagatgagagagggaggatatggggatcaatagttacttccttagaagtcatggaaaaagcacgtaggagacaagggtgagctggatgaccttgggcaagttatgtaacttctctgagtttcaattctctcatctataagataggatgataaaacctatgttgcagagttatgttgtaagaataatgggccgggcgcggtggctcacgcctgtaatcccagcactttggggggccaagacagacgaatcacctgagtcaggagttcaagaccagcctgaccaacgtggagaaacctggtctctactgaaaatacaaaattagctgggcgtggtggccctgcccgtattcccagctactcaggaggctgaggcaggataatcgcttgaacctgggaggtggaggttgcggtgagctgagatcgcaccattgcactccagcctatgcaacaacagcaaaactccatctcaaaaaaaaaaaaaaaaaaaaaaaaacaccaagaaaacgatgtatccagtcattgagccaatgtcttacacataatagatcctaagagggcaaaggagccacgacaaatgttgaattgtatttttgggaaacctaagtgtcacaggaacagctcactgtaacagcaaccggtatttattagtgcccagtaaatgcttgacccactgatgggccttggcccagtagctaaggctgagagacctttactgcacctggccttcgcagaagttggtctgtggatggggagagcctgaacctgcctgaggactgaacctgactgaggtcctgaacctgagcacaggacctcagttacctggccactgtggtcatcccaggggcacccagaacagaccggagttcttcctcaggcacatcactgccccagctttcagcctggtgtcattttcagcccatttctttttctcaccaagttgactcagcaaacttcccttaggttcccttgccctttaggcaagtctgcttccactaaagtccgcaggccttgtgtgtgctctgtacgttcacagcagcgattccttcccagggctaggagggggactttcccctctggcctaacatgctgaatcgtcctttccagggcacactcgcaatgtgtctatagtcaaggtccctaatgttgcaggagcacttcttcccctctgactcagaactactattttctgcctgttgggtctcatcaaagggtctgggccttttttccagttgtaagactctcagcaatgacgccaagatgccctttggccactgctcttctacagctgcctcagctcagagctccggggagtcagggtccctgtgagtcaggttttgcaggagagcatccactccctaggactgtgccttctcctctgggtgctgactgacttctctgagaaatgctcttctgggccaggtgcaatggctcatcctagcactatgggaggctgaggcaggaggatcgctagaggccagaagttcaagaccagcctgggcaacaaagcaagaccccatctctagaaaaaatcagaaaaaaagaattgcctttctggctttgagagttaattgcctttcatagaaactggaagcaagggagaaaaagcagcttctggttgtattttcttctcagaaatctataaactccaatctggccaaaaacgcaaagcaccagagtctgagctggagagtgggcacctgagagggtaccgcccagcctagcagctgtggctgcctgccagattgacagctgtctttagacctcaccccaaggggctgccagccccccacctcggggagccctcgctcccagccccctttccatacttttcagatacagggcgtgtcggctttcctttcgcgcctccagctccagaggccctggcccagtggtgctgctctggatcaaggcctcgctaaactcccagctccctggtttgcaaagcaaacttcagccttttactatttaccttggcaagtccaggaccggattgatgatctgtaaagtggatttgttatttggctgtttgctttggcagctcttgaaagcactttgctgattacagtcccagatgtcattgcatacattaccctgctctataacggggctttgaacactttaatttgaactacaaatactattaagctttttgcacctcttctgcctttagttcttggatattaaatatcggaacagacagcctgcattctcttaggcttctttcccctggtctttgtcagcgtcctcccacggagagcttcaagctttcttcctgttctctgtgggtctttctagaaaccttacccacctatgcccacctctagcccagctacgctggcagcagccttgccagttttcacataacaggctttctagtttggaaggtgcactgtgttcatgccaagcctggcttccccgcagtcacaatcctttgtactttgtactggggcttcatttcattcatccacaggggtgctgtatccattttttgtttgtttgtcttaatgttactgacaactttgtttggggaaagctagatttgggggcatgaatgtgtcatgtcattttgcccagagaggaaaagtcttgcccaaggttacacagaaaaggcagcagcagaactttatcctttctggccaggcgtggtggctcacacctgtaatcccagcactttgggaggccaaggcgggcagatcacttgaggtcaggagtttgagaccagcctggccaacatggtgaaaccctgtctctactaaaaatacaaaaattagccaggcttggtggcacgtgcctgtaatcccagctactcaggaggctgaggcaggagaatcacttgaacctgggaggtggaggttgcagtgagccaagattgcctcattgcactccagcctgggtgacagagcaagactccatctcaaaaaaaaacaacaacaaactttatcctttctgaactccaagcctgatatttctgcccaggctcccttttttatactttatttaaatcgcctcacccgagtggaacagggacgtgagccatgtcagtgtctgtaaatagaggcagttgcaggttcacgtatcttgggaagttattggtggagagcactggtgttcctggctaatgtggggtctgtgattcagtgttctcccaggtcagtgctgcttccgttgtaaataaaccattagctgggggcctcacctcaggaagcaatttaaggcccaagagaggtggccaaagaagtcagcttgcagcctctaggaggagacgcttggctttgcccacagccctcggccccaggtcttcctcttggagcaacaaaatgctcccagggatcctcctgccaagatcctgccaggcttccctcgcctttgatttgccaaattccatgtgaacagcctctgcgtctgttactctccgaagaaaattacagtttctagtacacctaaactgaatgttggtgggattgtttttattgtttttttttcctttttctttttgcgctcaccccttaaaggtcgtttctgatctactccctctcctctagccttaaagtgtccactaggttcttggctgaaacctttcagcatttcacaaggtgttagagacagagaaagcctccttgttatggagaatttgtggtgtgcctgtgaatatttccaccagtcctgcaaggaagatagttctatcccattttatagttgaggaaaccaaggctcggtgaggtaaagcgcttcatccagtaccccacagctctagggtattgttagtctgggttctgacttaggaactgcagcgtcccttctgtgttgtgagcaactcaaagttaggtcgaatgtcacgcttaatgttgtatctcagtgactaaccctgggcccggcttatgttatgttaggtgccccataaatatttgttggatgaataaccataaatccactcaagtggttctgattttaagtgactgtgtcatccctgtggccagtctctggcgggggcggtaggggacaaacactttcaactttgaaatatttcagttgaagaagttaattcactttgtaagtttactttaggagtagagattattgcagtatttttggccaccgctctcaaattcttctaaacctttactataataagcaaattcagcagattaaggacatacttaactgccaaatggtgttctgaactgtgtaaagttaccagagtcgcttttttttttcttatataaaagattgtgtgggttctgtgaacttctctgctttttttagctcttcctgttttattgtgtttgaagtatctttgtggtgacctgttgggattggattcttccatatggaagtgtttctttaactttttaatcatttcttttgggaagtaggttaggggtagcagatgttgttctggcattgtttgccgagtggaggtaggggcttttggatctgtgagtcaggccaaagccagcctggaagaagaaggctgtcccaggggtgggaggctgcccatcactgttggatctggcagtgcaggcccgcgtgggagtcgtagctccctgtgtcctcactctgagtaacgccttttccatttcctaggaagaatacattttcccctgtgacactgaaaagttattttttttcagtgtcccaaggcaaattcttatcagtcctcaaatgggaagcctatctggtgcccttactgggaaaaaaaaaaaaaaaaaaaaaaaaaaaagcagaaaggaaaaacagcaaataagatgaactcttctttctcccccttcatggcagtcaagtccctcttcataccccatttcttagtgggccaaagtttaacatcttggttttgggaaaaaaaaaaattcacaaagacccatctgcctctcccattttctcatgttcttttggactctattactcaatcagtgacatgtgaccccctgggaaggttgttctgtggaggatgcagaaactgacgattggcagtcatcttcccagctctcggcttcaaccctgattctgacagtggcaggcgccacttgcccttggtcggttttactccctgcccctagtgcccacctctccttcatcccaggtcacacccaaaagccaatgaagaaagggttttggtttggtgagtgcactggctcccttggatccaggggataaggatacaatgggaaggcccatgaagccgcctaaaggagctcaaactagcatttcccttggcattctattcctttcttgaccagaccaaggctttgcaggtaaactagggaatctcagcatctaaagactgaggaggctggaaacattggctcaagcctgtaatcccagcagttgggaggccaaggtgagcagatcacctgaggtcaggagttcgagaccagcctagccaacatggtgaaaccccttctctactaagaatacaaaaattagccgggcgtggtggtgcccatctgtaatcccagctactcgggaggctgaggcaggagaatcgctcgaacctaggaggtggcggttacagtgagctgagatcgcgccactgtactccagtcggggcgacaaagcgagaccccatctaaaaaaaaaaaaaaaagaccaaggagatgagtggaagagccagtaaaagagactgcaaagtagcggccggaaagatgggaggaaaaccaggtgagtgtgctgtcccgaaagccaagtagagagagggtcaactatgtcgaaagcacacttgacctgctgaaagatgaggccagatgataactgagaaatggctgtgggattcaataatgtggaagtctctgcattaattgatttgttgaaaaagaaacggggacgacattaactttggaagagcggtttcagtacagagagggggcaaagcctcattggagtgtgttcaaagagagaaagggaggaaagcagttgtagacagcaagtccagacatctctttcaaggagttttgattaagggaaagagagaaatgggggcggtaactagaagaggaaatgaggtcaagaaggtctttctttttttctttttaatggaagaaatactagcatagtgatggcaagagggggtgggggctggtgcatacatggagggattgaccttggtagaaggaagggggactgtgtatacacagatgcagggggtgggtggattccaggacaggactttaaatacctttctgatggcttccattttctcgatgaagccgtcatctaagccctccactgaaagcgagaatggtggagaagatattgacagtttgagggtagaggagaaacgatgaagtaatcatttaggagggtgaaagagtgaatgcgctcaggaaatagcactggagggcagcattaaaggtccgtctggtgtgagtgatcatcaggtcaggctcagacccgttagcatggtgtgctttcctccctgctgtgagtcgctgcgggggacggggagtgggtagaagttggatttaacaaggttgtggtttcaccaggccggtatggccaagggaaagagggatgcagaagctgagagtgtgtgcaagggactgagtctaacaactggatgtggtgggaagagaggacatggagttgggggatagtgaaaagcaggcgggatcaatgtattatacaccctggtgaggctgaaggctgcttggaattgggttagcagaggcagagaaccagaaggagaagagacaacagtcagtgtgggatatatgagattaggattgtgatgagatttgcagttattgttaattccatcaaaggaagagccatggcagtgagtggcagaggggatggagaagggcgctggaagggaggagggtcagggcctgagaggccaggttgctgacagggtcatctgtgtgagtatgatcgggttagtgttgtgacactgttagagtggcagtgaagcagaagctggaatcgttaaggaatagggagtgtgagtgtgctgagggcatggggcgggcacaggaacagactgtaacaagaaggggcagtgggtggaataatcttacaacacagtcaaagttgggggttttatgaaagaaagaaaagtctgcatctacgaggagcaaaaagaacatcagctcccaccctggtctaagggatgagagagagaagtcagccaccacaggagaggactccggggcaggcggtgtcctcagaggagagcctggtatttccccaaatacggcagtttagaatttacagagagagtgagcgtatggacacttcctgttctatctgatcctttcagtaacccttcaagtggagaggcaggtacattatccctgttaggcacataaagacactgaagctggtggagccggaacactggtgcagtggcactcagcccgctgctgatggatcctggtcttctgactccaagttcagtgctctttccacagcatcatactgcctgcctttaggaggccagcagtccctccacagaacccctaaaatcacactcgattgacagttgcaactgaaaagcacacccagtccaaagccgcaatggttgttatcacgctgcttccataaagtgagattcagcccccaaagatgggttcagggagtggcaatcatccggccttttctctgcgatacccaaaatatcttaaagtcagtagccagtactaggacacaagtgggtactccctttcagggatgatttggatagcaatttttggatggaaatcatagttttaagaaagttccgaggccacaactttctagatatgatagacagaaaagtgattatgagacgtggacaggcagtgggggcaatcatgaacttcggacagtggtttagggcttggttcttttgagacagagtctcagtctttcgcccaggctggagtacagtggtgtgatctcggctcactgcaacctccacccctcagggttcaagcaattctcctgcctcagcctcctgagtagctgggactacaggcatgcaccaccacacctggctaatttttgtatttttagtacagacgaggtttcactaaatctccattcagaagctactctggcaccatacacaacggtgcacaattgaagggcttgttctgctcctccacatggcacctttagaaacgtcacttccccaccttgtgtggcaacagccttggccaacgtgcttatgaagagccatggcaggctggtcttgaactcctgacctcaggtgatccacccacatcagcctcccaaagtgctgggattacaggcatgagccaccgtgcccagcctagggcctggttcttaagaacgccattcccttcttgatcctcaggcccagtgagtgaggcagtgtggcagtccaggacctcccaacgccgagcacatcctctctccttcctcgctggggcagatgcttacacaggtagagagcccaagcccaggctagcagcctcagttgctcagtcatgcagcaggcgtatgctgaccccctgttacagtcctgggcagacagagatgtgcaccacactacagaaataaacacagtaaagggctagaggtttctatcatgtactgtatgaagagattttcttttcttttttttttttttttgtgagataaagtctccctctgtagcccaggctggagtatagtggtgggatctcgactctgtaacccccgcctcctgggttcaagtgattcttctgcctcagcctccgaactagctgggattataggcatgtgccaccacatccagctaatgtttttgtatctttagtagagacagagtttcaccaggttggccaggctggtcttgaactcctaatctcagatgatccacccacctcggcctcccaaagtgctgggattacaggcgtgagccactgagcccagccgagattttcttttaaaggaaggtgagagagtaacttcttggccaccttatcctattttcccaggctcctgggccaccgaggagggtcaattcgtggaggggtggcaccaaatgcctctatcatccctctctgccatggctcttcataagcacgttggccaaggctgttgccacacaaggtggggaagtgacgtttctaaaggtgccatgtggaggagcagaacaagcccttcaattgtgcaccgttgtgtatggtgccagagtagcttctgaatggagagaattacacaggtctccgtcctgttctctaagtaccaatggtcaggcagacacaccgacccaggcaggagcagcgatctggccatggtttatagcaacagggagtgcatcagaatcacctgatgagctttttaaagatacagatgcccaggccccaaacttttgccccagaagttctgactctagtctggagtgggccttgtagctccatgcatttgaaaaactcacttgatgtgaggccccttggagaagtactggttgaggaagcgtatgcagaggtttgagccaaacaactggatggcaaggcaacagacatcccactgccgttcctctgccacctctgagtgtgatcagatgtctctcctgtcagattccctttccaatattatcctccaggaacttgtgattatcctctgtctaagtcaaaagcagcttaattcctctaaaaacagtgcccgttgggcattttgcctggagagagagaagcaaatctgtgtcagcgttctttgctcagttctgctctgcagcccccatggcgacaccctctctctttggaccacctcctcccctttcgcttccttccacacagtccagtgctttgttaggtacctgcatcccagcaggactggggacctggctggatgtgggcttgggtagagttggccagatgaaatgtggttggcaagaaggtcctgagtgtgctgagacaggcaagagtcagtaataagatcagagagtagaagactagggccaggagcgtgggacaggctaaggatgccggctagcccccaatcccagagagcatgcagctgagtctaagagaggcttcactgatacccataaggaggcggaatatgcaaaccctctttgcttaggagaacctgagttcacctgccaaaatcatcctttgacattaaaaaaaaaaaatccccttgcttttaaagagccaacctcttaccagttgcttctcttttgtcagagacatgggcctcttcaaccaagtctctgggtcttcttgtcaagactaatttccttttaggcccagcttcatcttcacggggactttcttccatctgtgcactgatgttagtgtcccgttgtcatttaagtccttgattctctgagaccactatagagactttaaagaaggtgggtcctaagttttgagggtaccatggagagcaaagtagatgatatctctgcccccatggggcttatattctagaggaggaaacagccagcagtggcagtagtgtgttacatgctgatagggcaggttcagggcacctgacctaacctaggagaggatcagaaaaggcttcccagaagttcgatttaagctgcagttgagggatgagcaaggcgaagatgtaaaggccctggggtgaaaggaaggaggttgttggagggactgagggaggttcatcatggcttaccaaaaggaagggagtgggagagatgagccatgggaagccagcagggcccaggtcattaagtaagggacaaccatggcgaggagttgcaatgtcactccagccccttgtttgccaccatggacaggtattttatgattcctggatcggaaatacacacacacacacacatacacacacacacacgcacacccctcacagaaaaatagccactctgtcccttctcatgcggaggaagcacagggtaatctggattataaaccatccgcctggggcagagctcgcctgctgtcatcatcttcctccacctcgggatgccactcagcctcacacagcaccagctctctgatgaagaaaagaagtgacaagggcaaaatcaaaaactctccagaatgtattcagagggaaactaaagccgggaagagctgttctcttgttcccagccaacactcacactcctgcctgctctcatcagaggagactccgcttccgctatgcctgactggctggctgggcgattctttgggggctgtgttttgtgcttgtcactcccgccctgggtcacttttaggatgtgtggactgctgaatctttaaaggaaagaatgagcaagggaatctcagaggcagttagttggcaggttgtttgctgagaatgaggaaagagttgtgacaggcttggggagcttgaggagaggaagaaatacaggagggaagtagccgggaacccatggaaaaatgaaggagggagggaggaaggaagggaaagaaggagggtaggctgaggagcagggagcgcctagctgttaaatttgtcatggtgccatttgacacagcatgtgcgttttgtgtagcacagctcagcagcctggatggttcatcttgatgggtttggcaaagcggaagtggcagataggctaggaggagcagaggtggggactttacggtggacttagtgagggtgttagaggacctatgagccccaaacacggggatgggcagtgaaggagtggcaccaggaggaagccagtagattgggatgatagggaggactccaggggcaagcaggctccttgaggccaaacagcatgattagaataaggaagtgagtgggagagacaaataggaagttttatgatgaatatgtgggctttctaagcttaaaatcctagaagggccaattgtagacgatgagtgagttgagtgagttgctggagtgaaggtgaaggtcgttggtgtgcggactggaggtcagtgaatttaaggccaaaggtgttggcttggtcatgcacctgacatcatacttttagtgcttggcaggagtggttgagaaggtaacagcggggtaggtgccataatccttgttgaagtcgaggagttgacttagaaggcctgcagagtccagtgacaaggatgtttgggacagattttgtgagctctgagcttctctcctgactggaagatcatttctttggaagaggtgatgtcatccacaaagagcatttgtattcctttggagaagaagtacttccttttattgtcaggtcattttagcatgattgaaaaatcaggagaaaacttttttaaatgcctgaaaggaatgttatatgagatgtctaaagttctggcctccggttccagctctgtggcctaatacaaagtcactttatacctcagcttctttctgaaacggaagagctgcctggggctgttgtgaggctctgtgggatagcagcacattcaagcattgactgtgtatcaggtgctgtgctgagcatgttcattgaagtcttactatttttagtattcccattttatagctgtataaattgagccaagagaggtaaataatttacccagggctatgtaactattaaatgacagaacaagggccttgaagcctgagcctttaaccatttcctatactgcctctgttaggctctgcaaatctaaaaataagataaagcaatcagtgccaagtgtaggagaaggcatgaaggcaagccacttcaccacagtctcatctacgctgtgttagagggttagcatgtgctgtggggatgtggtagagggactggttcctcatccagggtgactccaggaaggcttcccagaggagcttgcacttgggctaagtctcaaatctgcagaaggcagttcgtcatgtcacttggtcacttggcacctcttctcatgttggtctgaaatatgccagatcactgacctctccctgtgtcctgttttgccccttggggacacagaaaaattgattcccttttctataaaatcactctctaaatattggatttttgttttaacaaatttttttttaaggcagagtcttgctctgtcacccaggctggagtgcagtggtgcaatctcagctcaccgcaacctccacctccagggttcaagcgattctcctgcctcccgcctcagcctcccgagtagctgggattacaggcatgcaccaccacacccggctgatttttatatttttagtagagacggggttacaccgtgttggccaggctggtctcgatatgctgacctcaggtgatccacccacctcagcctcccaaagtgctgggattataggcatgagccaccgcacccggccagaatcactcttcagatatttgaatagtgaaattgtagctttcatattgtcttccccaagttaaacaaccttgatttcttccctcccttcttcctgctaggtgccaggaactgaggcactgtgctgtgcactggggacagagatctaaaaaatgaaaagccagatgctgcccagcaggaacttacagtctagtgggaagaatagggccataaaatattttattgcttttgtctgtctcctttaccaaatttcccatcatccagcatagcgactggtgcacaatagacatctgttttgtctgttgtggaattggtgactctaggtgctatgtgaaggtaagcctagggtgttgtgggggccggtaggaagacctaagtcagacccagaaggggagtggtagacttttccggctgacctaagtcctcaaagatgaataggacttcaccagggaaggcattccaggcagagggagcagcagatgcacagacacaggggcaaggcgcaaggtggggtgtagcgttcagagtctggaaagctgctagaggccagatgatagacagttgtgctaagaagattgggcttaatcctgagggcagatgagtaaaatgttcagattcacattgtagaaaaggtcacccaggtggcactaggaagaatgaattgaagggaagccacattaataggcggaaagaccagtttaaagattgctagaataatcccaatgagaactggtaagagcctaagcccagtggctaaggaaagtaggagacaaattcaagagggcttgggaagtaaaatccacaggacttactggtcagctggatggacgggcgatgtttgggccaatgagaagatggtgttgccacccacctaagtagggatagagaaggaagagcaagggctggagaagttaggtcatgaatttgtttgggagatgttgagttggaggtgcctgtggaacatccaagtgagggtgcttggtcttacgcagatggttttggagcccaggagagacctgagttagaggtgcagttttggaagtcagtagcatataggtagtactgggtatttgtaagcgttagagtagctgaactcacccaagaatagtttacagagaaagaagagaagaggactgagggcaccaaaatttgagttgcagagagaataaagcgaggccttgggagagacttgggagcggtcagagagggaagaggaaaactgaggaagctagggagtagtcagcaatttcccaatgaagtcaacttgctttatagagtctgggttgcccacaagggaccacatcattgtacctaagctgccatgatcatgggaggacagtcacgtgcttcttgcaacctcttgggcagagattcttttttttttttttttgaaacagagtctcactctgtcgccgaggctggagtgcagtggcatgataccggctcactgcaagctccgcctcccaggttaatgccattctcctgcctcagcttcccgagtagctgggactacaggcgcccaccgccacacacggctaactttttgtatttttggtagagatggggtttcaccgtgttagccaggatggtcttgatctcctgacctcatgatccacccacctcagcctcccaaagtgctgggattacaggcgtgagccaccgtgcccggccctcttgggcagagattcttaaggctggatttgaggacccgtgctttggagcagtggttcccaaaatccctggataagaatccagtcctaccctagaatcactgtgctggaatatccagaagggcctgagaattcatttgctcagtaagcattccaagtgcttcttctcatgagggaagtctgggagtgactccagaccataggttctttccaactgcacaaatcacacccccactctcccaccctacaccctaataccctccaacctaaagttcttgagaatccccatgatcatgagccactgttactgatggaaccatgtcatgaatccctcagatgtgtgggatggaaatgctaacccactgaccgaacagagtttctgaacaactgagtgggaaattctgcacttagattattggtccagtggaaattctgcacttagattattggtccagctctgcttctccgaaagcttttagaccagagcccctcactgccccctggtgtagacagtctgattgcctactccattttgtggaataatggacctgactgtaatccaacatgttttttaaagctagcatatgtttcaaagctgactattaaagaagtgtggaagaggtaccatatgtagacaaagaagacgtttttgggcaattgccatggaaagagctaactctacttttttatatatttaagacctaacactgcttcatgtccccagcagtggaattcttgaagaatgtttaatacatctgctctcaggagtgattttgtacataaggccttcgtctctaccaaaggtattagcatagaagcagttcagaaggccagtgccctttgtgtgaaattgcaaatttgtgaaattcaaacattgtcattcatttctgaatagttaagatcaataatctctcctgaacaattggctttgggacattgtctttctaggaaaaatagaaacataaattatactcatttaaatattgcagagagaagggacctactgagtagaaaactcaggaatgtgcctctaaggaacttagggacctctccttttttgggttcttttatttcattaaaaaatatataaattttggctgggtgccatggctcatggcattacagagtgctgtaatcccctccactctgaggtcaggagtttgagaccagcctggccaacatggtgaaaccccgtctctactaaaaatacaagaattaactgggtatggtggcacacacctgtaatcccagctactcaggaggctaaggcaggagaatcacttgaacccaggaggcggagattgcagtgagccaagatcgtgccactgcattccagcctgggcgacagagcgagactctgtctcaataaataaataaataaataaataaataaataaataaataaattttattgtatgtatttaaggtatgcccaaagggacttaaatcatcacttcataaagatacctgtgtgtccatgctcctgcagcattattcacaaagccaagatatggaaacaatctgtcagtggatgaatggataaagaaactgtggtgtatgtacacaatggaatattattcagtcttttttttttttttttgagacagagtcttgctctgttaccatggtggcagtgtagtggtacaatcatggctcactgcagcctcaacctcccaggctcaagtgatcctcccatctcagcctcctgagtagctgggactacaagcatgtgccaccacacctggctacttttttctatttttagtagagatgaggcctccctgtgttgctaaggctggtcttgaactcccaagctcagatgcttcccctgcctcagcctcccaaagtgctaggattgcaggtgtgagccaccatgcccagccttcaatcttaaaaaagaaggagatcctgccatttgccacaacttggagttattttagaatgagagattgaaggatggtgctgtctggtggtccctttcagacccatcatacgtacttcagatctaaatatagcaaaggcttgttctttcctacattcattcagtaaacaattattgggcacctgttatgtggcaagatctgtgctgggcactttctttgtccttagatatctttgagacatcaaaataacttcagggtgagctcagtttgatcctggaggacaggaattgagtatctcgtgcaatattaaagctattgtaaaggcattgctggtgacttcccatttccagtttagctgcatcctgaactattttttcccttcctcaagaagccaaacagcatgggaattatccttacatctcaaagtacctggtgtaaagtggtgaaagcaccaaccgaaggccagctggcttctgggagtaaaatcagtacttgacattcagattccacgttcgatttttgaatgatctgtcatagagcctatcatttgaatcttagcacgattttgaaacttacaattagcaatagtaactagcagtattattcctcttatacagtggagaaagctgaagttccaggaggttaagtgctttgcacaaggtcacgtcgttaggacatactagagctagatcgagcacaagtttcccactctcgattgagtgctctttttgccaacagagctcaatggccttataaccacctcatctctcccccttccgcatctcagaatggcttaaccaggaggatgtaaggaggtgctaaatgaagagaagagactgcagctaggtgaaaaggcacaagcaactgctgcttgagggtagctccaagggcaggagtggaaggagatgggctggttcatcctccaccactcgtttcagatattcacaactggagagccatctcctacatcagaggacatacagctcgtctctaggcctcttccctttagagggaggcctggaaaggactactgactttttgccagctcgttgagctgtttgttaggtatttctacaacaaacactgcttttacttctttacctatttttttccccaatctgagggatacaagaaaactattctagtagtttttcaaccctaaaggcatttctaaaactaaaatgaaacagtgagaaattaattccttcgttcagctgttagccctaactcagagttagatgacaggtccatgtccagctgacgtagtaacaagaggtctctgggcccctcctgggagccccttggtgctttggcttttttcttttttccctactcatggatgaatccaatcttctaatccagtatgtaccttaggcccaaagataaaaagataggtttctttgcacacacaaacacaccctgggctgactataaatctgctccttgcctgagtatagcagaaacaaaatatgttgcttcctcctcgagggaggaattggcatttcttccacaaggaaggggtgagaggaggctctactggcctttttgaacttacttctcagctagggaaatgaataacatcctggttggcctcggtggagtagaagtggagggaaggaggggtgatgctgaccccacactcgagccacagcctcggaatctctttacccgtaggcgccacacttggcacacaatgagtctgtgagttgaggggaaatcacaaccagattaacacagtgatttgggcattttttcacacttactaacgagtgggcttttgacaaggcctaagtggagccttctctgcaggcaagcctggactccccacccctctcctctaggcagtaaggcctgtaagagaaaagggcagagatggacccaagtcttgcttgccctctgcagctgtgcagagaaggcctggtgccgccacactcctgctcggctcctaggctgctagcgggaggtatgaatttctcttgtttgctttaatggagtgttaacccccgtcgctggaactcatgttaatgcctaacacaaggctgggactgcagggagaggccaagggactggcagctgaaggcaatttgaggattgacctcatggggtggggagagggaggagaggaaagggagacatcagttgaatgtctgctggatagacaagccggatgtaacaggcccaagaccgatgtgcaagaccaaggttctgtctgctcctgcttctgtcacaggccatgtcctgtcccctcccctccctgggcctccatttccttgtgtttaaaagaggagatagaaccagatatactctaaggggaccaacagccaaaaaatgcttttggggacaggccagggggaggggagtagggtgtgggcagtgattctgcagcttccgtgcacacagatcccctgggggtcttattaaaatgcagctggtgacgccggcggtctggggaggggtctgagcagctgcctttctcacaggcttccaggtgatgctgctgctgctggtgggtggagcacactttgaacagcgaaggtattgagtgcaaaatggggttctccagtctaagttctgccccgcacttcacttccctgccctgatttcctcaaccgtgaaacggggaatagtaatcgttgccttgtcttcctctctaggggtgttgtgaggattcatggagcaaatggctgtgaaagcaccttgtaaagggtagagcagtgtgcggcgtgagggattattatcattgttaagacgtctacgcctcgttgctcaccctgtgtgatcctgcagcttctcaacttttccctcctttctccctggtttccacgcctgggctgctgagtcaggcggaccggccaaggctggcgagggctgaacagatgctctgacatgtcaaggcaggaaatgacagttcccaggcagccctctgtttcaggtgtggaacaggctccgaacacactttgtgtgataaattgtagtaacgccaggctgagctctacctccacccccttaggctgcaagactaggacatgaggctgaaagtcagagaagtccctgtgagacgagggccctgagcaagcactggccagactgtagcaaggccactcaccaggccaccccgctggttctacttccgcacccacctctggcagccatgatgcttctgcagcatgccagtttgttcactgagaccttcacagaaggtcgcacaaccaccctggacggtgagaaactaaggtgactgaggcaagtcattgaaccaccctgagccttggcttcctcatctatgaaatggagttgacagcatctgtcctgcctgtggtaaaaattgctgtgatcccacaaccaaaaggaaagagagaattatgagaaaaatatgtacttattctgtgaaaatatgtgagattttcatgagagacttcctgttccagtggactcttccaccgcccttgagtggggaacatccaggccttcacactcacgctcagcccatcacccctctgtgcaaggtgcaaggtcctctgcccacctgaagcctcaaggcctgatggaaaccatccacagccactctagtaagtgacccctccattgtccaaaacagtgctgctgcttagcctgctcttctcaggccaagtctttgttgaacagcttcagtgcaaggacctgggaagtcgggattctgtaatgtaccttgcccccagtcaggatgggaggccaggcccagatcttcttcccaaggaccctgcacctgaaaatctggtacaggtttgtcctttggagtgagagctcttgggtttaggtggttgagagaggtggaaggttgaccacacactccaaatacacatgtttattgcccaagctgggaacaccatttttaaagcccacatagttaggagactaccaaaataacaaagctaaaaatgggtcaggtatcaaacgggtcaactccagtaccggcaggcacatccgggaccctccccttcagggcaggtggactcctcctttcctttccccgcagctactgtcccagggccttagaggaacaaatagcccctggctccagatcagagccagtgtgcccacccatccctccctgctctttgaaattcccaaggccagcagggggcccaggcctgcaaagctgggcctccagacacctccgccagctggggaggcagagagttcgcactctgaggaaacgcagatcctcagaggagagtaaaaggtcagaaataatccaagaggacaagccactcgtgtctgtgtgtatattgggtttcacatctgaaatccagtcatgataaatctggtttttgaaacatcttctttgactaataaaaacagaagacttcttggccccaggtttcagacttcaaagttctcagttgagagcctcgtgtttgacttatttgtggagcacagaaatcacaggatttagctgggttgctccctccaccccctaccacccaactgcaagaacacttaaaaattctggaatggaaagactgagctgaaaaccccctcgctggcactccagccatattttcaaaaaaaaaaattcagcatggtagttttagtggagaaatgacaggctttggagccaaatgaacctaggatcctaatcctgactgtacccttgaccttgtcatcttaagcaacaatcttacttctctctgccacagttccttgaactgtacaaattggaacaataacatccacctcataagttattgggatgatttcagtgcaatagtgtgtataaagtagctatgcctgatgcaaagtggacacccgacaaatgttagttatcttacctttcctgatacctgaccacagactaattatttggaatgaggactgtcctagaaaacccagtttgtatgcttgctgtcttgagagattcagttccttgtttttccattgaaggaattgctaggtttccgaggatagtttgtcttgcagtgtattctgagccctgccataggaatcctatcacagctctatgtgtatgttttctatccacctgaagaagcaggccagagcagcctacaggaaacattttctttttcttttctcttttttgagactgagtcttactctgtggcccaggctggagtacaatggcgcaatctcggcccactgcaacctccgcctcccgggttcaagtgattctcctgcctcagcctcccgagtagctgggattacaggcgcctgccatcatgcccggctgatttttgtatttttgtagagacggggtttcaccgtgttggccaggctggtctcgaactcctgacctcaggtgatccacacgcctcggcctcccaaagtgctgggattacaggcgtgagccaccgcacctggccaggaaacattgtcattgcagcccagctacaaaatgattcttctcttcctccttggagggggagaaatcatgagtgtgccaagtttaaaacagaagagtaaagggtctctggcgtccagtctgggaatgccagcttcagcctgacttggaaagctctcttgttccctgaagcacctccatgtttgttctgaatgtggagccagtcgagattctccttactgggacctacactgatgactgatctcttgggctcacagccctgctcaatgacctcatgatgtgtgagggcctcagccatttcttgacagtcatgaaaaggtgtctcctaggaagccgggcctgtttatccagaggttagttgtaggcaggggagacaaagaggacaggtaaagggacttgattttaaaatcaactccttccagagttgttcttctagccctttctgatctgatgtatgaaatttgtacagaggtggaatcgtttctgccatttttcacacacaagttggtgcacattcctaatatgaattaaaaataaatatgccatgtgtacacagggatgagtcaacattgcatgcagccagccatggccactgggagaagagtcagacatgggccatggagctgcaggctcacctgcccccggctgagtcaggaccgagcacaggacttgacagaggaggcatcgcagcaaggtcaggtgcctcccgtgcttcttatgggcccacctggtcccagcatgagtgcttctcccaggaggcatttttttgtctctcgactttttctttctttcttttttttttttcttaaaaaactgattacagaaactgtaggccaagtgcagtggctcatgcctgtaatcccagcacttcaggaggccaaggcaggagcatcactggaagccaacagtttgagatccagcctgggcaacgaacaagactccatatctacaaaaaataaataaataaataaataaattaattaattaaataaataaataaataaaataacaggtgcctatggtttcagctacttgggagaggagggaggattgcttcagcccaagagttcaaggctgcagtaagctatgattgcaccactgcactccagcctgggcgacagagtgagatcctctctctaaaaaaaaaaaatttttattttttttttttttgaaacagagtcttgctttgtcgcccaggctggagtgcagtggcgcgatctcggctcactgcagcctctgcctcctgggttcaagcagttctctgcctcagcctcctgagtagctggggttataggcgcctgccaccacacccggctaatgtttgtattttgagtagagacggggcttcaccatcttagccaggctggtcttgaactcctgacctcattatctacccacctcagcctcccaaagtactgggattacaggcatgagccaccatgcccggccaaaaatttttttaaaataataaataataataaaaaatataaaatacaaaaaaataattaggaaacagctgggcacagtggctcaagcctgtaatcccagaactttgggaggccgagacgggtggatcacttgaggtcaagagttccagacccgcctggccaacatgttgaaacctcattctactaaaaatacaaaaattagctgggcatggtggcacatgcctgtaatcccagctccttgggatgctaaggcacaagaatcacttgagcccggggggcagaggttacagtgagctgaaagcatgccactgccctacagcctgggcaacagagtgagactccatctcaaaaaaaaaaaaaaattgtgggaaacatatagaaaaatataaagtaacagaagagtcccctatagcctgactacccagagacagcgtggttaacattttgtcgtgaatcatttagaatgtttttccatgtttcttttgcattgttcaataataataactgtatacttttgtctttttaaatttaacattgtatcttaaagaattctaattataaacatcatgtttatgactacctaacattctactgcaagaatgaagtataactttcttaacaaataccatattgtagggctgtgttaaaatggcaatgagcgtatttatgcatgacggttgttgcttcctaggttatttattttggctagatttctggaagtggcatccctgcctaggtcagtagttgggcacgtttttaatttttttttttttttttttgagacagtgtctccctccatcacccaggctggagtgcagtgccacgatcttggcagactgcaacttccacctcctgggttcaagtgattctcctgcctcagcctcctgagtagctgggattacaggcatgcaccaccatgcctggctaatttttgtatttttagtagagttttcccatgttggccaggctggttttgaacttccggcctcaggtgatccgcctgcctcagcctcccaaagtgctgggattacaggtgtgagccaccgcgtctggccttgattcttaatgcatattgccaaattgcccgtcagatagcttatactagtaatattcctgcccgaaacagtcaatctcattccgttcttacgcgtgttgagtataactctgcttgtttatcgaagaatttagggagctaaaaagttctatccccaccctcagatgtggggagatcagagctaagaggttgcttctcctactctcctgtgccccctgcaggcatcctcagagaaagtggggtgcacatactcaccatacgctttcactccccaccaaaggcccttgctatgtaattgacgcataaccagtcagccttaccggtggcattgcccaggctccagtatttctcctctggctgcttgcctctggcccagtgttccctcagtcactctcttagcctttcatagaatcccactgccccaaagaagagctgcttacagagccctggggtaatcctctaattttgaatgggcctgtgtagcttacaaagcacttgtcaaaagacaaaattataacaaacttcattatagatctaattggcttttatttgtgattcatgaatctgggcagcctccattctacaaaatagaatgagagctcccactgggcagtggtagaacagcgggttttttaaggtgagatcaaggaaacaatagaaaaaaaaaaaagctcattggttaacatcaggttacttcaaggttttgttttttttttttgagacggactctctctttgttgcccaggctggagtgcggtgccgcggatctcactgcaatctctgcccaccaaattcaagtgattttcctgcttcagcctcctgagtagctggaattacaggcatgcaccaccatgcccagctaatttttgtatttttaatagcgacagggttttgccatgttggccaggctggtctcagactcctgacttcaggtgatccgcccaccttggcctcccgaagtgctgggattaaaggcgtgagccactgcgcctggccaggttctttttttgtaaaggattaaaggctaccctgactcagttagactgaaatctcccattttcaggaatagctggtctgttttgggatctatctgcttccttaaagtttcagtttgattgtgtggcatttagcatgggtgattccatttcattttggtctggtgtgtggggcctagtgcaggagctcagttcaaaacagtggcctcccataacttttcttttttttttttttgagacagagtctcactctgtcgcccagactggagtgcagtggcgcagcctcggctcactgcaacctccatctcctgggttcaagaaatctcctgtcagcctcccaagtagctgggactacagatgcacgccaccacacccggataatttttatattttttagtagagatggggtttcaccatattggtcaggctggtctcaaactactgacctcaggtgatccacctgccttggcctcccaaagtgttggaattacaggtgtgagccactatgcccaaccaacttttgtttaatacagtctttcataatactatctggtctgatgctcacaacagctctggaagccaaatatttgtttccctgttttataggtttattattttcctaggctgctttaaggaattaccataaacctggtgacttaaaacaacagatgtattctcttgtatttctggaggctagcattctgaaatcggggtgtgagcagggccatgctgtccttccttgcttcttctggcttctcaccactcctggcattacttggcttaggcaggataactcacatctgtctttgtcttcacatgggcttcttccttctgtgtctctgatcccctcttttctcttttaaggacaccagtcattggatttaggacccaccctaaacccaggatgatctcaacttgagatccttaattacatttgcaaggacccatttccaaataaggccacattctgaggctcctgctggacatatcttttgggtggcgtggtggggtggaacaccattctacccattgcagtggataaggaaagcaaagttcaaacagggaaaatgactcttccaacgtcatgcagtgagaaagtaacaagagctggcatttgaacccaggtcttctgcttaacatatgcctttaattgggtaaaaacaagactcttatggtataactgctgactgttatctggtttgtagaaaatgaaattggtagcttttaccctaggatacctcaaatatcagacaccattttctggaagtatactattgttaacgacattgaaactattagtgccaatgtgaaccccttaaatgggcatcatttatttattttctgtgtcataaatggggaaattaagacctagagggatgattctgctgagagagaaaaagaattaaaaaaaaaaaaagaaaagacccagacggagtagcaacttgcccagagtaaccagaaaagttaatgggagaattccagttatgactcagatgtaatctatgttctaagctttaaagtgtgcattatgcaattgcatattttgcagttgtgaaaatggtctccttgtcaaaataactgtgttagattgcaaagaaattcttagtccaattgccattgaactccttttccctggctcaggaccatgcgatatgatacacataatatataacataatataatatctgatctatatctatatctatctcactgtgggagaacgctggctcatataattggccatcagatgtgtccacaggtataatatataatatagctgtggtatatataatatatctgtggacacatctgatggctaattatatgagccagggttctctaaggaaacaactaataaaagagatatctccagagatgcatagatataagaagatttattttgggaattggaaatggaggtcaagaagtcccactgtctgttgtctgaaggtgaagaaccaagaaggctggtggtatataaccaggggagctgatggtgtaagtcccggtccaagttcaaaggcctgagaaccaggagtaccagtgtccaagggcaggaattagtgtcctaactccgacagagagaacaaatttgcctttcctccacctttttaatatatttaggccctcagttgaatgatgcctgcccacaatggtgagggcaatcttctttcctcagtctaccaactcgaatgctaatctctcccagaaacaccccccagacacacccagaaataagccttgctggctatctgggcatcccttagtccagtcaagttgatacatgaaattgaccattgcaccaagaagagctaatgtcctcagcctgtgcttatgggaaccaacttgtagtgtggagaaaggggtgctccccgcagcagcactcttaagctccgtttggtgagcagtttggtaagcttgccaaggaggctcccctctacactggttcccctcatcatgcctgggatcatttcttagttattgtagacgtcatcatcacaacctctcaccaaggagggcttacatcttgcaaagcactgcttaatgcaggttttgcttttggtatctggcctccctggtggttagaaatctgatcagcaggctctcagcaaaatccaaacctgggcagaacctcattaacgcaaagcggaggctgtgccacagtctcttaaatagctagagtgtgattagacactatcagcttagaggagcatcctacctgtccccctccacctgcagtcactaggcttccttgcctctttaacaatggtgtacaaaggcaaagcacgtgttcccccagcctccccaggagctaccagcttgccagctgtcacagcatgcctttaatgggtttgtgaaacccaagaacctgacccatttctcctctggggaaagagtataacacaggatgccaagctgggaagcaggattcgggacactcacctggatgagaccagctctctctgccgtcctagacagattgttttgttttttccaatttccaggatctccaaatctaaaataagtgcacagaaggcagtagagtaaaattgtgacattgttttctgctcacttatcttcttcttccttcctctcttttaattttaactccactttctgcctactctgaccctagatattcaggctctggtaccccacccaaagggtgttgactgcaaactgactgtcaaatttcataagtagtcaataaacgaacctgttttgagcaagcatgatgtacaaagttcggtgcctattttcattatggaggaattcatgccctcgggagcttctaaactagttagaaaagcagttcatgtgaacagtgtaaggcagtacggaaataaggccacaggaatgatctaattaacctggggtccacaggtgggtttcagaggcatccatagatgccccaaaattgcccgcataattttatgtatgcaagcacacattttttgagtaagtgcttagctttcatcaacttcacctggaaagatagagcaccttttatgccgttagagtttgagcaagagtagtctttataccttcggtagttgagcaggtaagacttgaactcattcttagaaaatagtattcagggcaggaggcagccctgaaaggcaagaatccccaggagatagcctgcgaagactgttgcacttacaaccagatgcctcatgtctctgaaactcagtaagatggaaacctatacaatggtgatcattgttgcttcccatagtttggtgaagtcacataagctcctctttttttttttttttttaactcactctgaaccttgtacagtgctcgactcatatcatagtggacactaactaatatttgatatatgtgtgagttaactgaaatagcaaatgtgagagggctttgtaaatagcagagcactgcttcaacaaaagatgtctgttgccaagagtgtgtattttgtcctttgcaaacagcctgcgctaagtgagcgtcttctccctgcttgaaactgaccctttcccctgtaatgggactcaaagggccagctcatctgatggagtgtccctgggctggtcagatgaatgatagctgtgctgtcaacatggacaagatgtgcagttttccaagagcccagagatgacctcaccctccaagggcttggcctcttcaccccagtgcctgctgaaacacacctgcagccttgctctcactctgggacagggagattccaggagcacctttgctgtcctcagcaaagaggctacgaggtgtggaagggaaagagacagcgggtatggcagagcctctgatgggactcctagcaggataagcaggaccactgattgtatcctctctatgacgtctcaggacggtagaaatgatcaggtgcttctttgctgaacacttctgatatctcccatcttcgctcctcaacttcctagctgtgcgcatgcgaagagagaacagacccactatcaaattgtgtttctcctgtgtgccatcccgtaaacatggtgactcatcgtcaccaccaccaaactccaagcaactcgggctggttgggagtgggaagggtttttaaatgtcattggttgaaggtgacaggagttctcaaaatggtaggaaagatagaagtggtttacacatattgtggttcttggccaggcgcagtggctcatgcctgtaattccagcactttgggaggcgaaggtgggtggatcacttgagcacaggagtttgagaccagcctgggcaacatggtgaaaccccatcttgacaaaaaattagctgggcatggtggtgcacacctgtagtcccagctactcaggaggctgaggtggaaggatctcttcagcccaggaggctgtggctgcagtgagccgtgattgcaccactgcactttggtctgggcaaaagagtgagaccccgtctcaaaacaaaacaaaacaaaacagttctccactgcaggtgttgctgagggaaacagtgtgtgagctgacagaatgagctccaagctaagaattagaaacccttgttccagatctgttgctcagagactttgaacatgtcacgtaacttctcagagcttccagtttcaccaccataaatgggggatagtacctctacgacctctcaggatcattatgatagtcagaatttatgatgatgccccaagtggtataaaggcatacatatttgtcattaagaacatatacatgaacacacctattacatacagaacactcactgtgtgtcaggtcttttacatttatctactgcagtcctcacaacaatcctatgtggttgtattgtttttccatttttatggatgaggaatcagagacgcatgcctggaatcatacagctcacgtgttagtctttcttgaagtccaggcctatttccatccaccactatgacactagctcatgattcttttctcgtgcgtactgttactttatcccttaaaatattacatattcctctggcctttaccatctcttatggactgggcccaacatcttaccctaacctttcttgctataacattgattgattgattgactgattgagtgattgactgagagtctcactctgtcacccaggctggagtgcagtggctcaatctcggctcactgcaacctctgcctcccaggttcaaatgattctcctgcctcagcctctcgagtagctgggattgcaggtgcccgccaccatgcccagctaacttttgtatttttagtcgagatggcgtttcaccatgttgtccaggctggtctcaaactcttggcctcaagtgatctgctcaccttggcctcccaaagtgctgggattacaggcgtgagccaccgtgcctggcccaatttcttttgtttgttttcttcctgctttggcttttgatattcctcttggtcccgctgtcaccccacctgccttgacctctgaacacagtaatgcaaacattaactgagctcctttctagagacagacctcctgctcttgtgaagtgagaaaacaaatggtcattctcttcccaattttccaggctctgaaacatctctgtccataagaaagctgagtgtatagcagccaggtgcggtggctcacacctggaatcccagcactttgggaggccaagacaggtggatcgtttgagatcagaagttcaagaccagcctggcctacatggtgaaaccccgtctctactaaaaacacaaaaattagccaggcatgatggcacatgcttgtagtcccagctactcgggaggctgagacacgagaatcgcctggacccaggaggcagaggttgccgtgagccaagatcataccactgcactccatcctgggcgacagagtgagactgtctcaaaaaaaaaaaaaaaagttgagccaacagggaggaggagggcccacgttttcttgttatcattaagtccttgcgtcgcatgcagacccttcagagaaacgatgatgctttagcactgtagcactagatcttgtcaaataaggtctagtgggggaagtgctggaagtggggactttgcttaatctcttcactcctgtgagacagggcaaagggttattcattctagtttagagatggaaaaggagctagaaggactggctgtgcatcatgcagtgagtcggcagcagaatcagaagcttagtggatgtcagcagtcctgtgtgtccctggggagctaggcacctgggagttgttgccaagggtggttgagtgttggctctgagcttggcactgccagtgcacagctctagcacagttcaggccttgggagaattatctgacacccagccgtgcacccccattttccagagcctagcttaccagatctacagcctgaccctacttgatggagaggtggcagagggagctccccattctcaagtcctacctgacaagctgatcccaagcaacccactcctaaggtgggcctcttcttggggagatgcccttatagatgctgcccattctcccagtgccaggaatcttccctacaattaggtacgagataaatcaaagccaaacttggctgacgaaattcaggagccagtagtgacccttgccacacatataaatcgcagcaggctggccaagggcctttgtctggccaggagagttcaggattatctggccctctttgctgatgtatggagtcaccggctgtcggagtgtttactaacggttatcacctcaatgctgtggccattatcagaggcaggaccgcctgccgaggctggggctcgcaccctctctattaccacctgtcattggcagggagtgtgtgctgacactgcccagccctcactgcctggcgaagatagtttctgacggctgatcaaagaggagaagcaaggcctgataaagagtgcgtgtttcgtgtacttttaactttgggaaacgttggcatttgcattttttccccatcttcccgatgctggcaggaaccaagcccaataaatgcagtggattcagttacctaatcgctggggaaatggtatgtgcttaaagcaacagagcgtgactataatctccttccgagagagagtggatgaaataagctttcacagaagacttgctgtataataaagtagaataattcaagttcggactttgaagtgatctcacatgtaagatctaatcttagcgttcagcagaacaccacagacgttttggaattggggagcagctttggcttaaggacagacccttgccgaagatgctatcacccacctccttgctggtatcccccaaagtaattccctggttgttcatatgcccttgggtagctgggagaccaggtagtgaagtagaacgtgttctcaactgaggcatcaggagagcgagttcttggacctcgtctgccacagacttgctcttccatcttgggccataacttctctgagctccaactataaaatgaggaagttggttataggttatagaatataatggttaagaaagctttaaaaacattaggctatataaccccttctttaaatgaaaatttatttatttatttatttatttatttgtagagacagggtctcgcgctgttgcccaggctggtctcaaagtcctggcctcaagcaatcttcccgcgttggcctctcaaagtgttgggattgcaggtgtaaggcaccactccccgccctaaatgaaattgtagatggaatcccattgtatcaaaaagaggaaagtagggatccgtttgggttgaacctgggaagggggttgccttccccgtcccacttcttaaggtggtccctgaagaccaggggaaccctgtagctcctcagaaacagttgtaaaaccaccagcctcagtgtcacggaagtcactccagaggtctgcactctctcagcggcatgagctatttctcctgcgctacccagtctgttggcggcgtgcttccatcctacaggaaggctacaatggaccctgggtatggagaggagcgggtgggaggtagacaagaatggcctgctccctgaaggtgtggactcaacgtcagatgtcccgtgtgtgccacaggtacctttgacaggagcgtgaccctgctggaggtgtgcgggagctggcctgagggcttcgggctgcggcacatgtcctccatggagcacacggaggagggcctccgggagcgacttgccgacgccatggccgagtcacctagccgggacgtcgtgggatccggaacaggtaaaggtgtcatcagacttctagcctgatttggtcaggaccagcacctgttggtgcagagcttctctggaatcgtttgtgggcatatgtttgtttttgctgttggtttctttagttagcactccagtggctatccgtctgaggagctctggtgttgggaaaccctgtgtaaaggggagctcccagtggaactgcccctcccacgtggaataccacatgcaggattgccatgatcaacaccactgtgcaagtggctcccagaaggacactttcctcctttgggggtgtccccacgtcttccagcagcgctcaggcactgagtcctcaggttgtacctcttcagacacgctggagacttagagattggcaagtctcagtagggcctgccaacctgagcggagtaagcatgaagcaggctgggctggtttcagcccctaccagcttttcctcatgctgcctttggccttgcattcttgcctctgagcgagtccagcaactagggtctgggtggcttcctgcatcccagagcaatcagaagacatccttaaatgatgagggagccctggcccaggcaagtgcatgttcatgtgcgcacacacgcaaacacacacacacaacatgcactcaggaaagccaccaatcatccatctccagtacagctgtaatacagcctgcctcttctttccaaaacccttctttgttctagatagctgtgctgttagtgactgccctagccctgcttttgtgctgacagaggctgccccagcaggcctcttccctcctttcagagggaactttctgttgggtgcagctgactctggctagaggccttttctctcctgcttgcctgagtcctctcaagactctgtcactctgctgtgcactgctccgttcccgttccacatgcctccctgcaaagaaccccagtaaggagaaacttacaacaatggggcaggcgctgatcaggaccagcaagattcagagtcagagcactgaggcagggcttgaaatgtctgacatcatcacacagtcccacttccccgtggctcctccagatctttagatgtttaggtttatggtcaggcgtttccctcatccatccccatgccggtccctccgttccttcactaagacgtgtcatctccacagcactagctgtgtggcctgcccgtggtgctcctgtaataactggcaaatgaacaggatggaaacgataggtgcaagggaggaagagggggagcttggctacatgggtagcatgtcatcatgccactgttctcccagctggacccagagatgagaagcatttaccagggcttgacttcgcttcccctggaagggggcctaagtgaggaatgtggcttacggcacaggcttttgcctgcatctctggggtccctagccagcctcggctcacataaaccggagcccggtgccactggacccatccccggcagcctccctcttccgaggcctggaggagctcccgggtggctcttctctcccaccgccttctcaggagccccttggagcatctcactgtcatccggcaagaggatttgaaggtgcattgagtcacagctgtggaacttcagcctggcatagtaacctgcacagccctggcagcaatgcatctgccagacagctgagggattcaggagaggctttgtggccttaagcagtttcatgaaattaaaaagaataaaaaaagagaaagaaaaaaaggtagaggaaattaaaactgcatgacccacaggtcagaaaataggagactccctttttttttttttagcagagggatttcattgtcctccccaaactgtcaccaaaaggaatttagttggttttctctgaccatattcgatgtatgttttatttttaagaaaaaacttgttctttttttgtttttttttaaggcggagtcttgctctgtcaccagactggagtgctatggcacaatcttggctcactacaacctccacctcccaggttcaagcaattctcctgcctcagcctcctgagtagctatgattacaggcgcccgctaccacgcccagctaatttttgcgtttatgatagagacggggtttcaccatgttggccaggctggtcttgaactcctgacctcgtgatccgcctgcctcggcctcccagagagctgggattacaggcgtgagccaccatgcccagcctaaaactactcccattttaaaggccagtaagcaaagcagatgttatggaagttacccagtttccatggctgagaatcacttttcacattttccaactagaggtaaagcatcagcctggtagtgcagcccaggactttgaaagggcaccctggtacacccgtgcccaggtcagcctactgcccggaggtagttggggaaatacagtgcaacgtgggtaagaatttccagcaagccactctttgcctatagcaacatctcagtccccctctttcttcccacaactctacttctctaggtggcttataggacaaatgaggtatccccaagtgtttgcctctgataggtcctctgatgcaccagagctaagtcagttcccttaatgctttgcagcaggcaccacatgtgacacagcaattgggacccatggcctctttatcaaagtatgaatgaagcacagagagcaactgaaaacttgctctcatgatccctgacacagaagcctattctatagcacgcctcactgttacataggtgtagccagccttgatttgtggatttctgtaatgtaaaaactcctattatggccaatttcaacctgtcacacagtgtcagctagctaacagaggttctggagatgtaacagtctgtgcactccagcacctggttggtaagctgtaccctagggcaggtcagctccccacaaagtaaagtgaaaccttttcaaacctcactattcagagtggtctgggggttgaaggatagctttggtcaaaggatacacagtttcagtcagatgagaagaataagttcaagagatgtattgtccagcatggtgactctagttaataacaatgtattcttgaaaatcactcagagagcagatttgaagtgttctcgacacaaaaaatgttaagtatgtgaggtaatgcatgttaattagctcgatttagccattccaaatgtatacatatttcaaaacaccatgttgtacatgataaatatatataatttttatttgtcaattaaaaaatatatatttttttaaaagtgtggtcttcagacccacagcagcatccgtagccaggcgccggtgagaaatgcaaagcctcaggccatgcccagccctgctcagccgaggtctgcatttcagcaggatccctgcgcatgctgaagtttgagaaggtcagttttaaattatggttaacttataagacagatggcagttctttggtccgtgatggatgccgaccaaatagttgaattcaatcacctatgtgatttgcaagtccagttctaagacaactggctgaactgcctttttgctaatatccttctgccccttgccccgtcacccttccatctttccattcggcaaactccaattcgagctcaatccaactctgctctcacacctgggttcctgaagaaagagcacttattattccaattggtgcctctacagatccatggtctccactctccactggagcctgctctgtgttttcctcatagccccgcccccattctcagtttgcacccatcttttgcagcaaaagacagtgcctagcgcagtgtctgcaatagagacgcagagacgatgaattcttactcagcctctggctacttctcagtccttttcttctgtcgtccttaggcgtatttctcaaggccttgtcttggccctggtctcttctctctcagtacctggcaatctctgcttccgtgtctccaattactatccataaactgatgatttccaaataatttccaagttggctttgtctcctgatctccagaaccatctattcagctacctattgacatatccacatgtctacgaactgaattcctctcttcgggccctttccttctctcgagtttccccatcccggtgtccaaagccctttgagaccagccactgccctcgctccagactcatctcttgctgccctgggccagctccagccaagctaaactcccagagggtccccgagcatacgcagtctcttgcccgcgaggcttctgtgcatacttttccttttgcctggaatgctgtctctcaaagccccctcctctctctgttacccccctcaaaataacttgactaattcctgcttagcagacattcctttcaatattgccttttctagaaaaatagaatttttaaagtaaacaaaacattgacttattccaactgttttgtgtctaggtaaagatataacttaataccagtaaaaaagctttttaaataaacacctgtgtacatattaagtacattttctctttcgactttaactctttcaataactgtagctgcaccttgtctttctttttagtgctctcacacatctgatatcaaaagcccaggccttatgcatgggtccagatccgtgtgtaaagtattccttttttttttttttctgagacggagtttcgctctgttgtccaggctggagtgcagtggcatgatctcggctcactgcaacctccgtctctgggttcaagcaattctcctgcctcagcttcccgagtaactgggactcagatacccaccaccatgcctggctaatttttgtattttttagtagagacagggtttcaccgtgttagccaggctggtctcgaactcctggcctgaagtgatctgtccgcatcagcctcccaaagtgctgggattacaggcatgaaccatggtgcctggcccctatttaaagtattcttgatgcatctctgttgcaggaagtatctgtttgctactgttaacattttttttttctctgtcacccagactggagtgctgtggcacgatctcggctcactgcaacctccacctcatgggttcaagcgattctcatgcctcagcctcctctcctcaggccctttcctgagtggccaggactataggcgtgtgccaacatgcccagctaatttttgtatttttagtagagacgaggtttcaccatgttggccaggctggtctcgaactcctggcctcaagtgatcccaaagtgctgggattacaggcatgaaccacgatgcccagcccctgtttaaagtattcttgatgcatctctgttgcaggaagtatctgtttgctgctgttaacttcttcttcttctttgttttttttttttttttttttgctctgtcacccagactggagtacagtggtgcgatctcggctcactgcaacctccacctcatgggttcaagcgaatcgcatgcctcagcctcctctcctggggccctttcctgagcgactaggactacaggcgtgcgccaccatgcccagctaatttttgtatttttagtagagacggagtttcaccatgttagccaggctggtctcaaactcctggcctcaagtgatctgcccacctcagcctcccaaagtgctgggattacaggcatgaaccgcagttcctggcccccatttaaagtattcttgatgcatctctgttgcaggagtatctgagtatctgtttgctgctgttaacttcctttttttttttttttctctgtcacccaggctggagtgcagtggcacgatctcggctcactgcaacctctgcctccagggttcaagcaattctcatgcctcagcctcccaagtggctaggactacaggcatatgccaccacactcggctaatttttgtatttttagtagagacagggtttcaccatgttggccaggctggtctcaaactcctgacctcaagtgatctgcctgcctcagcttcccaaagtgttgggattacaggcatgagccactgcacccggcctgctgttgactcttaagtgctcacagagtcagctctcagggtccgggagactgtctgttccccgtgactgttccttcctgcggccccgggctcactgattcttctttacagtgacagcattaaagataggaaaaggcttcatcttttcctgcctgccgtctctttaacagtctctgccctagccagaagtagttattcttggggataacatagtgggctcagtctttgcctcttaccttctgtcatatacatattttacttcctgacctagttcacccacatctataacccttcacaaaacaatattacggccagtgcattctagtacttccttttcttctattattctaagaattatcttgtactttctattttatttcattttttaaaaaatgcactcgtgacccactaaagtgatttcacaatacattggtgaatggcaatctgcgctttgaaaatcaatgctctagcttgttcacctaaatcctctgagttttcccatttatgtattaattactctgcagaaaaggctttaagattatgttcaactaaagctcttccaaagatttctgtcagaagctacttttatgtactgaaagggctgcgcctttctttttctcttgttaacataaaaagaacactttgaacattaggcagtttttaagtgatcacgggatggtttcagcaagttaataacaaatatttgttgattgctatgttttgcaaaagatgacctaaaagcactatttgtgtgtgtgtgtgtgtgtgtgtgtgtgtgtgtgtgtactaataaagtctttcattttaagactgtaaaaagtaagctcccaacaaatatgagctgtttttactggagtcaatcagatatgtaccaaataactaatccaaatatctcagtgtattggacccctctcctgcctctagaatcagctcttccaaagggccttggaactcctgcctgggtcagtatggagggctgggaactttttcaatctaaggctacatttccaatagggatcatattagccccatcccataccaggttgccacatgatcagatgacaataattgtaggcaccagtaccatgtgttaattatcttttttttttttttttttgagatggagtctcactctgtcacccagactagagtgcaatggcacaatctcagctcactgcagcctccacctcccatcatgttccagcgattctcctgcctcagcctcctgggtagcgtggattacaggcatgcgccaccatgcccagctaatttttgaatttttagtagagacagggtttcaccatgttggccaggctgatctcagactcctgacctcaggtgatccacccacctcggcctcccaaagtgctgggattacatgcatgagccaccacaccgggccaattatcttttagccatccctactctctggtcagtctcattttaaaagcagataattgatttatcagtattcgctacagaaagtagttgaccacatttgactttgcagacatttcagaagatgtggtggtggttagaattttctgcatcccacatatttttaaaatctgcaatttagagagaactttatccagtccagccctaggggtagatagatgcatcctactggcccaactcattgcaaggccatggaaataggaactgacagtgttgccccagaaagctggagaagtgacatttacatgtgttatgtgggcctctcaggtccctttcccaaacctgagattctctgattctaagtgaaaggtgagcctcctttatgggtcctgggttagccacactgttcctgtcctaagcaaacccggaggttgtgtgagctgaagatgctgccttcacagggccatcgtggctcatagccccataggtcacattccctgcttccctaccacacacaaccaccaagctgctttgatctttccagagaatcttctctcctcttcctacagccactctatcaggcaaactggtatttaccccagatacccaggaagggttagtctttcggcctcctgaaagtaggaatcgctctcctctccaggatccccagtgtggccgcccatgagacccagtcttgtcttttaattttttcctccaagccttacctctccaacttcctgggtccccttctcaagatgcacaagggtgattcatctgtgcaagccatagcttctggcttggtctggctctcttgccaaagtctctaggcttctctgggtaatatctctgattgcccagtgctcctaaaattgcacctgtctcagcaaatgctatcacccaagcaacttagccagaacctagggcttttcctctgccttatctaattgggccctggagttttcctccttctacagcatctacaaaagttctctcagtgtcttctcttaatgacctcatcagtggcccaacgtgttctttctgtggttggggcaggcagggtctccatcggtatctgccagtttcttccccaataggctggagaaaaataagagagacaagtttcctaccctcaaagagattaaagccccagaggaggccacaatactgaacggtgggtctgtttctctctgacttctacccccagcttcccgctgggcctccctagctgagctggaccaagtggaagtcaggagtgctcccctgcccacagggcatggtctttctaggatgcggaggcaaagctggaactccccagtgcctaatgccctgattgctgagggtgagagaagaaagtgtccccagaggcacagggccaccagatagagagcccagtcccaccagcaggtcacaagcatccctactcgggacaagagggagcagctgcgccagcgagactgtgggacagccggtggcctcggcaggggtggtgttgttggtgttgctatttgtgtctcggttcagtgtcggattgcctattcctagctattttccactggcaggagaggccaaatctgagagtcctttcagttcccagcaccaagctcccgctattgggaagaatgtggtgtttttttccccttttcgatgggatttgaagccctcatcaagcaatggggtaaacctgtgaccctgggcaagtgcctttccctctctgggccagtttcttcctctgtgacacagtgtggggaggaggagctagtaaatgtagtaatcgttggcctcctgtaactctgatgtcctggctgctgcagggagcactcggtctctctcttttactcctctccacgatagcagtggccacacctcccgtgggacttgtacgcctaagactctgcctgccacataaatgtcctctaattgtcagagcactgccaggtagaccttcccctctccagtttacaaaggaggaaacgaaagatttgaagtgagagtataactaaaagatgtgggattaaaataagaaatttgggaagaggttccagttattaagatcctgccggtctcccatggtctgaagggttggagttttatcagttattctcaccttttattcagaataagtagggatccagcagaggaaggggactgtcactagcagggcctgccttgactgccgttgcacttccctgctcagaaagtgtccaggcctgcacattgcacccaggctccttgccatcatgtttctgtctcttacaggccttccccaccttcccttccagcctgacctcccaccccttctgcagtaacctctgcatatttcacctcctccaccttcttgccaatataggatcccagcatccccagcatgcaccctgttacctggccctggtgcatgttggtcacccctcaggaccgctgccctcccatcctgcccagtcgtcgtcttaggccaagctcaaatctcacctcctctgtgttgctttccctgaccatgaagccaaatgtgtgcaactctctctgtctctgaatttctgcaccaccgacttgctggatacttggccctgggcaaagagtgtatgctgccttttccattaacttgctcaccaattcccttcgttttgccattggaaaagggccggccctggtggtcccttcagcccctccctcacccatactcccacgagtgtcttgacccactactggttctttgaactgagtctgaaccatctttgttatccccaaccaccagccttctccctgcccagcaaccagcactggaaggagagccaggctgagcctcagttaatgtttgttgagtgactggatgggtttctgtggcccctgagaggtaaatgaaagccagtcaaagcaatgggaatagttattgattaaaagtcacacttgttaatttctggccaggtctcaaatctgattctgggtagatcatttcccccaccccaccttcgtcactaaggctactggaagccccgccaggggcagagctgtaatgggagtttgggctgagactctcctctgcatatttcttagttgtctaaagtgacttttcaactctttcaccaaggcacagtgattcctatcaacaaggaggaagtgccagtgcgacctctgtgacccttcagagtcccctctccaggtgctgccccaacatgaaagcaggaattactgtggataggcacaggcttggactgaggggctgggggagggctgttggacccccagagccaggctctcctctggaagcatcaacataggtaaatggttaacaaaagggaggatttctccctgttcctcctcctctgccacagtattgactgttaaccactgacctttctgtgaggcgtgagattctgaacaaagttgaacgcggtcatggatggttaaattcccacctttcccttctgcccttgcctctgcccctctgccttctcgaaacatggcccgagatgtggaggccaccccctggatgtggtggctgctgagagagggagacacacttgctcacagaaaatgaaagttggcaatgaccctctgaccctttaggaatccagaatcttggctcctagaagccatagagcactgtaccaagaaggccaagccaagcccatccgattgaacttaacggagaagtgaagttccctagtagaagaaggcattttggagcccatcccggaaacagctttccagccttggccttttacttatttcttcctgcccactcctcctcccacgtcacccctgcccccggggacctgccggcccactgcataagacattttttaatttgctggcaaaatcccccagcaccaggcttcgcagccctcccctgttacccacatatgttttatggggtgtagcccgctagcttgcagttccacccctctgcacccttcattgagttttgggagaagcgccatccagtcgtgtcatttgttcaggatgacttttccattccacgcccgctgtgttcgttttcctggaatgttcccatcatctcccagctccagttggccagggccagcgtgccatctccatgctggtgtgtgtgactgtttggtgctgacccgaggggtgggttggtggagtacgagcctgggctggggccttataaggcctggagtttctcggtttcatgcgttatccatccccgaccactgagagctgagtaggatcctgtggttagtgcccttgagctggtctttgtgacctttctctaagcagcccaaccacacactgccatgcagctttgaacttcagacctggtttctaaatccacggaagctgagaggaggaagaaaatctgaggggttacccaggatgccggctttctctctacatcattccctaccccagccctgtgcagcaggcaggagtgtaggaactcaggcagctggactggggaggagggagagagggaaggatgataccagtttaggctagtgagaaatctgtaaaaccctagatgtgctgtgcctgggaacagaccatgaacacccccgcaaagctctcagtggtcaaaccagatttgggtatcgactcactttgatctcagctcttcctgctctcttaaaggtccagtttgtgatccgctttaaaggaatattttattttcaatacagacacagcccttgacgtagcagtaaaaaccttcccccctgagagacacgtggcagtgaagtgttttggtatgtaacgtcctatctttgcctatgtggaaggggttgtcccgttgcttcttttgtccctcaagagggtgccctcctaccccctcgtgcccaggcccaggagcactctagggagggcaggggtcagctcagatgggaggtctcttctggaaggggactggtttgggatggggagtggttgtcatccttcacccaacaagagtttctttgagaacgccactccctgccccccactttgaagatggaagtgaaattttcggactctgctgtgcagagcagggaggtcactaggctctaatgcatttaccattgactgcccctcttgtagtgcgtctattagtgagtaatttgatttgtacctattcatttgcagtccctgcaggagcctggagctggcccctagtataattggtgctgtctctatttttacatcattagattagccccgactcctggccacttgttgtctgcgcttgtctgtccatttatacaacctaatgtaacacaaaattcattactgatcacattactttcaactctgaagccagccttgtgataaacatttggttaaccccttcctacccacgggaggactgacagaacaaatgcacttccacccgacaggcaaatcgatatcttaatacaccaaagtggaattgcatttctagatttgttattcctcctggaggagcaaatggaaaggctcgcctgagccagctgaattgaataatgaatagagccccggcaccagcagccagtctgtgagcaccgcacaaaggcagaccggcatcagccaggccgtttccatctggacgggcggcggcaccaccacaattagctgagactgtgatcctttcccagccgcggcgtgtgggcttgagacacaggctgggaccccaaagagggcaacagaggccgtgccccaacaccattcctttggctaggcttggcctagaacactagaccaagaactgggttatttaacttcaaaccttgttcactgatgtcaaggctaccagacgctaaatgccaccgagaagttaaatctattactaaactcaggtttaccatctggaaaccgaaaaagctcttcctgtttagagccaggtcagtgacattgggattggttggttcacaccaacttgcgtgtgtgtgcctgtccccagggccagcattcttcagcacgcagatgccatgtgtgcctgtatgtggttctggttctctggtagggttgctgtgagcagcatgtgggactctaacacaggagctggccaggagtcttaaagggacctcaacctcagcacagcattattaatctagaaaattctctcctatccccaactggtcatcctctccccaaccttcattggtctctgggtagcagccacagccgcaataagtcattaactttcaggacagcttgtttcaaaatgaaaaatacccccacttattaagaaactctcataaagcctggggccgggcgcggtggctcacgcttataatcccaggactttgagaggctaaggagggtggatcacctgaggtcaggagtttgagaccagcctgaccaacatggtgaaaccccatctctactaaaaatacaaaaattagccagacatggtggcgcgtgcctgtaatcccagctacttgggaggctgaggaaggagaatcagtttttgttttttggcttttttttttctttttttgagacagagtttcactcttgttgcccaggctggagtgcaatggcacgacctcagctcactgcaatgtccgcctcccaggttcaagggattctcctgcctcagcctccccagtagctgggattacagtcacccgccaccacacccagctaattttttgcatttttagtagagatggggtttcaccatgttggtcaggctggtctcgaactcctgacctcaggtgatccacccaccttggcctcccaaagtgttgagattacaggcgtgagccaccgcgcctggccaggagaattgtttgaacccagaaggcggaggttgcagtgagctgagattgcaccactgcactccagcctgggtgaaagagcaagaccctgcctccaaaaaaaaaaaggaagaaggaaagaaagaaagaaactctcataaagcctgtaccacaatgattagaaaaattggcataggggaaggtgaatggaaccattaccatgaaagtcataaatgccatgaactgaaagaaaccatgaacagaagatcctccagtgggaagggaagccgggaaaagcagccctccagggaccattctgcctggatttggatatggggaagtcctgggcaggaggccgaggggcagaggcactgaagcctgaaacagggcaccccctctcacagaggactgcaccttggaccctgctgtcccttcagctgtccagagcccttccaggccagaagtggcaaacagtcctgagagacatggaggtcctggagattcttggagagggccaggcaccactctgggccttgtctgttagacggattcctccaccatctctcatacctctcctccttcgtgtacagggagggggcggggagaggggcgcctccttgccgcagtcccagggccccaaggtgagaagtaagaggtggggaagggcctcaccgtgtcctgggctgtagggccgggccaggccaggtacagggaggtccttgtcccaaagactccagaatcgtaaccctcaagcacttcctactgtgaggagctacaaagcaagccggggtctcctcagcagggtattatgacaccctcacatcccagcagtggaaggacactggtgtgtcactgaggtgagcctgggcacagtgctgtctcctcagggtcagggagacactttcagaaggagtaggggcactaactcaccacccccacccctgttgaacccccagcacactgtcttgctcggctgcaagcccgcagctttggcctcagctgttaatcctctcaggtgggtaaatggaacacgggggtgggggagatccgtgtatcccatgctggccccagccccataagctctagaaaacagataagagcacaggcctttgcctttgcagaataggacggaccagtggcagggaggaacgcgcgtctgcctgtggaatgagagactgtgatttcttaaccttgatggaaaaggggaaagccacatcttaccaaactcttccgctgcgtcgtagggaatttaattacatttggacatttgaatgagaagcagatgtggctctggcccgccggccagcagctctcaaaggacagccactctcctgtggtctgcagggctcagtgctatctcgtcacgctggagggtagctcggggagaccccttcctgggaactagggtgggtcttccaggctttcagggctggacttcaggacacaggcaggtcaaggccagctgccagcacctagtgccaaggacgagtctccaagccctgtcccctcttcatagccgggcagagcgggcctgtgtgccggtgcctgagactcctccaggccccccattggcatccacacagagtggtggcgtggcagcacctggccgggcattctccatcccccaagcccacctgccatgcccctcggcactgagtccaccctaaatggcatcagccaaggctctgcccccaggttggcatggagtagctggagctaggagagacatttcagccccgctcctggagggccctccgctgctaaagacagcagaggcagcaaagcgtatttttttacccagtttcacgtgtgtgtccagtgcgggttctgcttcttaaagccccccacttgcttttctcattagagccgtacacgcccagtgaggtcactagagcagaccctcccctcctgtgccacagatgctgacgcagatgagaagtgaagtgacttgcccaggtcatttggcacatctgtgacagaactgaggccagagtgaagtctcggcctcctcgcacagtcctcctcctccctgggccatccacagggagtggtagggcagggcttctcccacatctggccgatcctgagcatggctccagccagtcctcagatacatccaaaccagcgacagaggagctgggtcagcacagcattttctctcccctggtatagcatgtggtgaccgcatgtactctgccaggggagaaaggggactcctttctcagtccctgctagccccagcacccccgtcctcccaagcgctcactgctggtaggcaaagaggacccctggtctgtgggcctggcagccagctctgaagcctgagggaggaacctggtggggaggggagccccacactgcagggtgaagcctggggaagagggaaagcgcaggggagccaggcagcctgggaggtgggtgtatgctcagtgtggtgggaagcagggctgcctttaactgctgcacttttcacctcctaaaaagtgccctgggggctgaggctggctccatcccagagtgtggtctctgacaaggctgtcaggggcttagagccaatctcagccaactccatctctgtctcacggaacaggcccccgcctcctcagccacgctctggaagagacagcagttgttttcaggcacaggactggtgtaagacaagcagcctggagccatgtctgcctgggccaccacctctccaggtgccagcgccagcaccaggaggctgccagccctgctcaaccccacacaatttgctcaagtcttccttccacttagtctctctctctctccaagccccattttgcatagctggtcctgtttgcaggacataagggccctgggtgcaggccccttgctgaccaagttgatcgcttggggcagaccccatatggttcatttgctgaacttagagcagtcacgtgacccgctggtctcctcttcacatgtcccatcaagggaaaatgcagaaaatgcccgacctcctaatgagaggacctcccctactacgtacctcactgcccattcaggaacccccaggcagaaggtactgaagctgttggttgcaaaccttctcaaagccaggcactgggcaagcgcgggcagctcggctggctgctgtgtgccgcgaagccatccgctcccctgggccaccccggaacccagccccagcaagggtcttaaccacagtccctgctgatgtgggagagctgagaggtggatgcaggagggaaaaatcgatgcatgtcaacagggttggaaatttattttccattttggaagagggtatttgcaaagaggcgaggagggaaatgaaaagctgtaaacacacatctgccatcttcctccctgggccatttcttgattaaaaagaaagaatccttcccaagctccggtggaagccaagctggtgagggcctggatggcagagacacctgctggggagggaggctggagagggaccctgtagtcctgtggatcatcacaatgactaatccgattgcagcaataatagtaactcacatttgctgactggaagcgttaagcactttgtgatgcactctacatgcattatttaatttcattcttagaaccaggccatgacacagacatcgttaacctcatgttcgggaacctgaggcacaaagattcgagtaactttcccaaagtctcccaggtagcaggtggccagggggtgtgctcttaaccacttccctaaacgcctccaccaacatgggcagacactgcccctctgccttctcgggttctcttgaggctgggggctggactggccaggggaaacatcctcatcctcctgctcactgctggaagcaggcagagctgtgggtgcagggtcagactggaccctaaggtctcatcctactcccaccagtcagcgtgggtggagaaatgcagccagggcccagtcacagtgctctgccaatcccttcagtgggcagcatcaatgctcatgtacagagccgtggacgctgctccttttgtggtgacggaagtgccagagctgcccaaagggtgaaccaggggccccaggcagcctcttcctaaacacaaacagagcactgtcctccctggcccctctcaggtccctgagactagggctcaatgcccccacttccgaagccagaggagcttttcgcagggcctttgattggccagacgtccaggttggaagagacccagagaacaccaagcccaaagcaggatttccttactgtttttttttgtttttgttttttgtttttttttttttttttgagatgccaggctggagtgtagtggcacaatcatagcccactgcagcctggaacacctgggctcaagggatcttcctgcctcagcctcctgagtagctgggattacaggcacgtgctaccacacctggctaatcttttaatttttggacacggttttgctgtattgcccaagatggtcttgaactcttggcttcaagtgatccccttgccttggcttcccaaagtgtgggattacaggtgtgagccactgcacctggcccgacttcacctccgacctactgctggggcccctggtttggcctctccagctttccctgcgtctcacacaggccctgtgccctccgcatttcacccctcccggggagtctgctgcccgtcaactcacagcctggcaaaggggccacaacactgcactgtgggtggaggtgcatgggcccatgctgcacggcccagctcaggagtaggacaaggtgtgggcagccatgcccttgcctcctcacagacaaagagtgaccccaccccaccccatctccctgggcacacgctcccaagtgaccagggttgcttctctctaaaaaggccagtcccctctttctgccccctctgacacctctgagtttggatgggctccatatggagtggggcagcatgaggatccagcttgcttttttttcaccctgagaacagtagtgccaaggatccggctgtctcatccttcacttgtttcatgagagcggaggcacctttccttcagttgctactcattcatcatccccctacccctgggggctgtccatcctggcccaaggcatagaggggcagctgcgggtaacaggcccatttccaatatgagccaacagggaatggctctccagcatgggcatgggggccggtcttagtgatgccggagctgccagcaccctgtggcccgcaccagcacccgttctttcttgggggatgggggtgggaggtgaagaaccagagctagtggttgcttcgtcttccttggttttgctctctgcaatgtgggtatatagctcccaccacccaggggaccacatccctggagagtgcaaggtcacaatgaggtgactgggtctagccacttgcctggaagccactcctcctctcctgccctactttggggcctggagaacaagctcttttaaagcttctcccactgaccagaatctccacacctctaaggggggaggtggctggggacacttccctcatttcctgccacagagcccccagcactctctttcgggccctggcaggttcctgatggacttccccaacaggtccacctcaaccgcaggacagctgctcagacctggaggtcttgggagtgggggaggagggcagcagccaggagttgggccactgagtcagaaggtccaagggcatccctgaaaactgcagtctgtttccctgtcctcctccagcaacccacctgcatggggtcccatctggcactgcatgggccgtaggtccccagccctcccacttcctaaaactgttcttcatgttgaacctgtgactcctctccccctcccccactctgaacggggtcttggccccctctgtcacagcagatccatctctgggacccccaagacagattggtccccagcccctacacatgcatgtcactgtcctccttgactgcaaactccccctcctcacggtgtgcccctgcgcctcctgacacctctccacctgcttgcagagatcagtgtacttctcaatcgttgtccatatcttttccaaaaagattcctcaatgcttttcttttcaaaagggaaaaaaaaaggaaaaaaaaaacaatgccaacagcccagcgtccgtgagcaacccaacagtaacaaagcatgcgttcgggatggaggaaggtaaggccacacgtttccatttgccgcttgctcgtagggctgggcggccgggatgacttggaggggggaatctgagcagccctcctcccctccacttcccacacacacccctgcctgcagggggaggagcagaaggggtctgagaggaggcgtggagaaaagcgcccacaaagctgccccggggccagcaggcccccgattctttcagttagtctgtgttgaagaatgggcccccacctccccttaccacatcattcattcattcattcattcattcattcattcattcattcatgctagaaatgtttagggcacccatgattttccaggccactagggatacagagttaaggcacagaacccccccgagggggtctcccctagatgagacacatgggacgatgagggggcctgggctaggagtcagcacagcgcagggtagggtctggcaggctctgctcgggggacaggacgggctcacagaggagtggacactcgtgctaagctttggaagatgagtaggtgttctggggctttgtagagcaagttacatgaacacaggcccagaggcctagaaccacctggatgggtccaaacaccacacagcttcatcacttttgtgtctcagacataataacgggtatcactagtgaggggttggcggcaggtcatggagggccatttcacagtgctggggagttcagaccttgccctgggaactgttaggagtggctgaaggcttttacgcagaggaaaagcaagatgagggctgtgctgtacatagcccactctggctttggcacagggtgggtgacctggagtcaggagactgaggcgcacagggcaggcttagccagggcagaggcagaggagggagaagttcagcagagccttggttaccttaccctgggatgcgggggcgagggagaacgctgcccccatccttcttacccgggtctaactggcaaagggaaaatgcgagcaaggcgctcaggttgtccctggcccccaagaacaggacattcatcttgtaagcccctgggtggctttccctgcactgtggtgtgatgggctggggtgcatccacgaagactcattggtgggaccaccgaggctgctggggtatttgctgggggcctatgccaagggacggtgggggtgccatgcctgggcccgggctcccgtttcctggcttccttggcagtgtggatgtggaggcattttgcatcaaggccgttaaagctgcccctgagctgtaaaaaggggccagccttccccatcctggtggccctgcctgctccttcctcgggggctttcttccttaggcctggcggcccgatcctaaggaagcccctgcttttcttgcgcctgccggtgctcttctcccgcccgcctggccctgctgtcagcgccccctagtgccgggccggccgcgcatgagggcggtgggacagatcgcccacaactcctcggcttgcttttggggaaataaggcaacagaggggtctcttggagtctggagcttccatgtaaaatccccagggtctactcttggctttaccaccctctccatctcatggcacgatggcctgtccccccagattagggtgatactgaaggaggagcaggagaaaaagatcctatctgccttgttttctatccatatccagatagctcttgactttcccaggcagccaatgtcccctggaggtcagggaccatagtcaggccctcggtccctgtccacagtcccatccccctactttccccaatttgccaagaagccctggtgtcccagtgaactgtcccaccgagaccccggcgacagactcggctgatggatcccaagggcccctcccctccccaggcccaggtgcccgcctcctccccactccactctgtggctgctgcaggcctgcagggagtcggggtcagtggttcgttgctggctggctggtgttggccagcccaggagtgaaggccatgaccccttcattccctaaccagagccggctgtactgcgcgtgtggtggcagggggcctgggagcggttgcaggatgaagaccaaggtctcaagccagaccagacgagtgcaacgtttttgcacatcttgctgtttcaagtgactgctttgaggtcctgcactcctgggtggacaggccagactccttcagtcacaggcaggcatcccttggagaaggaaaggttgcaggtctacatatcttggcttggggcaggctccagagactgcccggtgtgtgtgtgcccatatgtcagagcccccgggggagactgaaagggaatcggaactgaccaccttcaaaaagccaagaagtaattggttcttccttgcactcagcaagcagggaattccattcccaacccacctaccccaggacctgacttgggtcaagagatggtaggacaattgagcggcccacagctgaattagatggatcaagctgccatatctgaggtggcaacatggatgtgcagggccagggaggcagaggaggaggagggcgggactccctgcctgcccttcaggttgatgctgaggggcctccaggagacttggggcctaagaggaaaggagaaaggaggcacttcaggcagacagggaccctctcttcattggagcaggcccctctcaaaccaggcatcccctcccagggaaacaggacacttggcaggaggtgccaaagatgagccaagacctggccagcagatggactgtgtgggtgagcatgagtgaatgagtgagtggcaaagccaggcagaagctctaggcacaggcagggcaggagagaggtggggacagatcaggcagggatgctgcaagccctcccgtgtcctagcttctccccgcctgcctcccctgtagagccgggacagaaggcactgtggagttgggggcatgctggctgagcatgagtgtgtgcaggcgtgggtacgggctcatgaagagctgtgtagtccacacacatcgtcagggtggccgtgcttcgggcctaaagggcttcccgcagcagggagacggtgctctcacaccagagtctgccagccagggggctttccctcccctggctgagccttcctgtgacctgagctgccccctgcccatccagggagcaggcggggatccccctgcggaaggacacaagtgaacccagaatggtgcctcaaggcaggcagcctggcccagatggtgcccccactccccagacccaactctaaccaggcctggccctctcctgtgtcttgcagaacttcagcgagagggaagcatcgagactctgagtaacagctcaggctccaccagcggcagcataccaagaaactttgatggctaccgatctccgctgcccaccaatgagagccagcccctcagcctcttcccgactggcttcccgtaggtaccagcaacctgcttctgactggccagccccctcccctgctggaggaggggagaagccccgctctggtcctacccttcagtctctgctcttccttcatcaaccaccttccccaagcttagtgacagcagccgcccatcctacctggatggagaagagacccttctccaagcacctcagcgcacttgccctctgccacacctgtcggtggaggctgtggccaggagagactgtagaagctcggtccctgtgtatgtttgcatatgacatcctgcattggatccgcttttgtattttttaaccatacccacggtggggcgggtggggggagcctggaacagtgaccagatctgggggcctgagtggggacagagttgatcgtccacctggccattttgaccctgagtggacagtcacagcctcagctcatgtctggctgtgacacacactgcccccagcttcccttggtcagccccactccagcacggggtgaacggaggcccagagtactagggaaggaggaagggaggacatgcctcttcttcctcctttctttccccatctgttcatgggaagagtttgtctttcttatctttaagcccctttaccctggtcctgtactgatcagtgaaggaaaccgtggttactgaggccctgttgaaaagtgcacgtcttgtccaataaatcacgctgcagttggtgtccatccctgagttgctggggtaagggtcctctccaaatgctgagcagagtcctatggcctgagtgcccaggatcccaacaccccctttcatgtgcaacttgggggcagaaggagtcagtggaggattggaatgggaagaacttttgtcctggaatttggatggggcctgatttaagaagcccattctctaagcatcttgcctgttaccagaggcaatgagttcttggggtgccacagggttggaccctcctccctggggatcagggcttgccatgtgctggtgggttgctgtcaaggggagagtctggcaaagcctcatctggggggcaccttgttgtaattgcctctttttaactcagaagatggaagggtggtcaggtgaaggtgggtatctcatgaaacctggccggaaccctcagatgacacgttcctgattttgtccccccgccccaccaccaccacttccggacctaaagtaagtggcaacagagacaggaacagggagaaaaaatggtgcattgagcaggaaggagacgaatgctagtcctttgcccccttccctggcccacacttcccagagaccccagggaggccttggagaatggaaggaaacccacagagccaggtgtgatttggggtaaagtttaatggaaaagccgtggaaacgttgagttcacaaacaggacttcccgtgcaactgtccagccagacctggggcagctcctggggaccctgcccccttcacacacacccatcccatccatggtgcctgagaggccttcatcttcagttccctccaccagatcagttgggcatgttgggggcagagatggagggttgttgaatcacactaggctctgtaagctgagaagacgatcctgcacagggtggcataagccagtccctcctgccagggcacctgcagggcgagaagtcacatgccagactgaggcatgcttgcgaacactagcctggccccagcagcagggggtgctggaggagctgcagcttttccccatcttgctgaattattgatgggcctggcactgcccctacccccagctacagccatgtttcaatcaaaaagggacaaggaggagagtgctaccaggctacctgtgcatgctgcccatggcctgtcttcctggggatgggttcagctgccctaggaagcatgagcccctctgaaaccaccccaggacacgtggatgtggcagagaccttgctgccaggggctctctcaaccattcagggaactggctggcagcttacagagtcaggagtcctccctggcccggcccttcccctccagcaggggcaaaacagctgtggcctcccccaggcagggaaagtggtgggtgtagggctggacttgccggctgagcttgcaggacaatctggttattcatctgcttgaagtcagggcaactctttgagtatgtgggggaagggtgaggataagagagaccagataagctggccccacagcggctgccactggagctcaggttatcagaaaggccttgggcctggcctccggctaattggggaggttatggagcctgccatagcctgtaatcagctggaagggagagctgggccccagggttggggaccttactggccactggccccagagcagccgcttcctatcctctacagataacatccagggcaatctgggactcacccccagccccagcagacctaatggtggcatcatctgggagggcatcagaacatgaatcaaactgtggctgatcaggggacctttaggaatccatgtgacctaccgattctctcggcactacctggtcaacgggcagctttactacggacttcctctcaatttgatgaaggaaaaataccttcatgatctggaaagaggccggtgggagccagcgtggcaactgaaggagcaagagtactgtctgagatgagaaaaggcacggtgggcctgaggccaattcaagcacacaagctcaaacaccagggccagcccctctgtcaaggagcagaggccaggctaggcagccaccagtctggaagtgtatatggtttctcagtggtaattttttattttcacaattcagggactcatgaaactagaaagtacctgagagttctgttcgagcctcattttttttgcagatgacaagcaagcctgagccccagagaagggcagggccttgcccaaggtcacaaagtcacacgcctagtgagcctatccctgtctgcacctggctgcttcacaccctggccagttcccttagagggacccaaatccgaactgacctccctgtcctgtgcccctatcccatccagaatgctgaccccactgatccccatcctgactccatcaggcttcctgcctgggctgagagactgaatttgcagctgctcccttgcccctgtgtagctggaaggcagccctcccactgcagacctagaactggaggctctagaggcaaagggacagtgcatcctgtatgtctcgaattcagagcaagagcccaggggagggtggcagccctggcatctcaggatcaccttgctgtaggagcaggggtaggcagctcagcagcaccggcttcttaggagtgggtttggacttgctctctttaaggtcccagggtcccatcccagctctgccaccagcaggtacgtggccttgggtacatgactgcacctctgggattcagggtcctcatgtgtaaaggagggagtggaggggagagagcagcatgcccttccgaaggcgcgacagagcagaagcaggcagaggggaagctgcgggtccacaaggcaaacccatggttcgaggggaagttgacagccaggccaggtgccccttagcagggatggggagggcggaggcggcacagctggagcccggattgtggcacgccgtcaccgtgctgctccggggaatcccgacccgctccctgcgaaagcgtttccgaacgcgaacccagagcctgtgaacgcgccggcaagccccccactcccccaccgccgcccgtcgcaggtgggcccgtcctaggggtccttcctgcgctctaccccgtctctcaagtcactcagtcgatcgccccgttcacgctcccgtgatcccagacatccataaccacgatctcgcctccatgcacatccaacgcacgacggtgcacagacgtgcacctgacttctgcggaccaggtgtctcaagcgtacagcggccacccgcggaaccgcggcccggggccagtgagtcgtctgcagctccccgggttaggggattccccagaactccgggaaagtcacccgaagtccatccgggatgcggccttggttctcggccgcgtgatctcgcccttaggtgcagaacgacgcccttccagggcccacagctgccaggctgggccttgccctcgcatcccccgggaagaccagggacggggccacacaggccgtggctgcggagacgcttccccgggccaccccgcgaccaggagggagtcgagccgcccgctctccccgcgtcccccgccccatcccagccagttggccccaccctgcgcgggataattgggacgggagggaggcgacgggagggcggcggctccagagagactgcgcgcctgtcagcggcaatttgtttaagtggacgggacgggccgggccgctgcgggctggggtcaccgaggccgcggcccccaccccaaccagacctgggaccgcgggggagcccggtccggccgctaaaccgggctggctggcgccagggctccgggaggtgcggtccggcggggaagccgtgatgggaagcgactctgtccagggagtgtccttcaccaccacactcctcacgtccaggcagtgatcgacggcctggcggcaccctcacagcgggcccatagcacggggccacacacgtcccctgagcttagcctgggcacattcgtctgccaccgagggcttaagccagtctgcagcccgcgccccgtcactcggacgcaagtccgtcgtccgctctgccacgcggccgcacagcccgagcttcctgctgcccactgcccgcggggtcacgcaaccccggccctgcacacagaggaggaagcggcggggaccccctgccacctggaggctcaacccggggaaggtcccagcagtgccccttaaccctgcgagaggtgacggggccggaggacggaagggcagccacgccaggctcaggaccgcggccccacccggcccaggccgtccccgctcccgccccatttcactgttgcgggaagcgcggggcgcacagaccgcgcgccaccagcccaagcccgcccgacgccctggccggagaccgcctgcgagagggaggggcggccgagcgcgcgtcccccgcctgtctgcgggacctggccgatgcgaagtgacaggggccggagctttgttgtggagcctcggccgcctggcgccagccgcccccgcccgcgccctccccctccagccccgggcggcccgcgaggcgccccccggggcctcttaaaggaacacgcacactcggcccccggggctccgccaggggagggggttcctgggaagggggagggggccggcctaggtgggggaggggcccagcggaggcctcacggcgccgctccagggcctcccaggcctccccagcgccagctttcggtgagcctcgggcattcctagctggagagtttggctgggggtcgctacagactcttcagagcggctgcagcaggacctcagggtgatcgcgggaccgcggggcggggcgagtggtgggatcctggcccggacagagccccggaaagccagagggaaggtcggtgccactgtaggtggggtcgccgtccccagatgcagccgctgcactgtcgccgccaggtttctcggtcaaataacccaggcctgagtgtttcaaactcttcaggcctcggacccctggaccagctatggatggactaatgaaatggactaatgtctaaaacgcacacatttagatgtacacatactcttacaaggacaaaagtatgtgtctacacacacacacacacacacacacacacacacgcgcgcgcgcgcgcgcgcgactttgcgaatgtattcacggattcctaggccggtacctgggttcccggctaaggaaagctgccctggttattatctggtcacctcaccggctgcgcaaacgtgtccacaacgggtccctccccgagaggccacatctcgcctaaggtggagccagcaggtatttgcctgtggaaaactgcagtggatcctgccccgtctgcgtagactgcgcagctcggagtcaaagattcgttctggccagagaggaggtactaagagaggtgcgacctagccaagaacgaggtcgtggagaaaaccctgtgggggcggcgctcacatatgcggtgatgaggagttgtgagggccctggggtcggccccgaaaagtagggataacggtcgcagaggccatactgcttccgccggtcccgaatccgcactgccaggagagatccggccttcaaacgctgctcccaacgttcaacaacgaagtgccctgcgaccggtgtgcgcagtgggcgggcgcctgcatgggtcaatgttggatgtacgcgcccaccacgcggttgtacgggtgggaatgtcacccgtggctagtgcatgctctgtcttttccttcagaaaacgaccttcaggaatcagcctgagtgttcgcgcccgagcccgattggaagcaggtgcgtggtcgcttcactctccccgtgcacaccttgagttatagctctcgctgcgcacagagggcaccacacggggcccgacacacacacacacacacacacacacacacacacacacacacacaccatcacttcatgggggggaaactgaggctgccggaagacagaaaacgaagactgatcacagaagagggggcttcaatcacaggtgctcgcagacaccccaactccctcacgcgttactcagcactccttaacttaggagacgtgcgcttccgagagatgagaagaaactaaaaaagtggttggcagggcgaagagaggaagccggtatttcggaagaaggagactttcgtctccggtaccggatagggcgaaaattcgttgggtcgcgggtggagaatccggggtccgcccgcgcggtgccgccctgtgctcagcgaaaggtgcgctcaccttcctggccccgaggatccgctcctcccggccgctggaaagctcagggcggggcccgggcctgcggagaactccaggttccttccgagtcttccggtgaaggcgggcgcgggtagggggtccccgcgtttccccagcgcaaggccgcgtcccgctcccgcccgcgccggccccagcagggctcggccatggctccactcaccagctcccgccacctgggatccgctcccggacctcggccgcccgagcctcccgactcgcccgcccaccggcctcgctttccagtgcctgctgtctctttccggggcgcagggacccccaggcggcgccacgacccggagctgggtcggaggccaggctggggctcgggccagagcggccgggcctctgggcgcgggagaaggagggcgccccctctccgctcggggtcgtgtcaatgctttgcacttggggccggcgtgcggctgcgggtccttccccaaggccccgggacccgggctcccctcgcctcaggccctttcggcgggtcaggtcggccctccgcgctctccagtccggcgcaggcagccgcaggcgcgggcgggcggtgggggccggggcaggaggaggggtctcggggcccggcggcccgtcattggttaatattttattctgttgacatgttttcttactgctgaggcttccgacaccttctcccaggccccccctcccggccggagcttggcctgagctgtcaaaaccccgcccccggagacccacaattggtccaaaaagcgtaaaatcagcaatcaaggggggcctggctcgttagcgcaggggatccgagctgggcaggacatgtgagatagtcacagttttccagagatcacgacaagatctaaccagtcgcgcgtggtccccggcgccggagcgggccagctcagcccggcccagcccggccccgcgcagagcccccgccgcccccgcgcacagagccgggtgccccttgcggtgcgccggacgggaagccccgaggagcagctgctgcgcccgccacccgggtcgtccgtccaccgcgcgcgccgccgcccgggccgggggtccgagccgcgcgcccccggccccggccccggcccccgggcgcctgggccggatgtcccgatgagagagccggcgctggcggccagcgccatggcttaccacccgttccacgcgccacggcccgccgacttccccatgtccgcctttctggcggcggcgcagccctccttcttcccggcactcgcgctgccgcccggcgcgctggccaagccgctgcccgacccgggcctggcgggggcggcggccgcggcggcggcggcggcagcagcggccgaggcggggctgcacgtctcggcactgggcccgcacccgcccgccgcgcatctgcgctccctcaagagcctggagcccgaggacgaggtggaggacgaccccaaggtgacgctggaggccaaggagctgtgggaccagttccacaagctaggcacggagatggtcatcaccaagtccgggaggtagggctgccggccggctggaaggcgcgcgggcgggcgggcgggctggggcacgggactgcacggatcagagcagagctggggactcccggctcccggctcccggctccaggttctggccctgacgccacgcttcgctcccacggacaaccaagttgacttttctcgtttggcaccggagcgatttttttttaaaacaaaaacgctaaaatcctccgaatgaaataaaacgaaaacatactgctaaagaatagccccaaccgttctgagtcccagcgcagaggaggccccgcggcttggccctggcggtctcctccgccccgcgctctcgctcttctgcgtccgggtccgtctccgagctcgggggaaattcagcctctctcagactctgctccgaccccgaagcccctagtgggacctgggcccagctaaccccacgctggttgctcggttcctggcagcgagccccgggtcagccgagccctccgcctcaccgggctgggagccctttctccaccgcgggcatccgagccctggacgcatccgccgccccaggccttaaagcctgaagaaagccacagccccggcccctccacccttcgactcagccaccgagaatccaggcctcgggttcaccctcttcccccgaactgcacggccaggatgtcttatcaggctctgtagcccagttcccaatacaaacaccctccagatttatttctgggagcttccgtcccaagtgggtatttcccctgaacgaatttcggggagattaaggagaagcgagaatatttctagagggcctagacttctctcctgggcatcagctttcatctcagatcagggagaaagagggtccccagatctgagcacaaggcctaaaggaggctgtttaggagagggtctgacaggcagaaatgggatctcctgggagcaacaaccacaggtggggtcgtccgggcagtgatgagagggcagagcagccgaccacaggggaaacagccaggcggcagcggtgtgcgcaacgaggagggataaataaaggaggagtggggtcctggaacctagaacagccggttccaatgggatctcctcccttccctccctcccaggcggatgttcccccccttcaaggtgcgagtcagcggcctggacaagaaggccaagtatatcctgctgatggacattgtagccgctgacgattgccgctataagttccacaactcgcgctggatggtggcgggcaaggccgaccctgagatgcccaaacgcatgtacatccacccagacagcccagccacgggggagcagtggatggctaagcctgtggccttccacaagctgaagctgaccaacaacatctctgacaagcacggcttcgtgagtgttggggcagggtggggacggtgcaggagcttgttgacccagcactgcagctgagcaggagagcagggcggcaggatctcccagggggaagcgctgggcaaacccccagagtgcccctgcccgggtcactgccctgtggtctacgtgggctgggcctgggcctgggccccagcgctctcctttgcaagcctgggaaatggtggggtcagtggctggcagctcacaatctcagttcctcaggccgtggagggtcccttgtaccgtcaatagggaggcaggtgctgccaggactgggtctgcagtgctggaccacggaggtcaccctgctcttggcctgtaggtgccgagcttggaagacctgcccatgacctcaacttgtccatcacccttctgccaagacccgcgtccctggccctcccccaagactaggggatttaaaagttaaaccaccctccccacccacccccccagcctccctaagacctttccctcctcccacaggcagatgcccaactaggaggagagggtttgggggttctctccatttatgcctgagcaaggccccagcgaacgggggtggtgtttcatagggtaaaaggaactgcccattctgaggtagggcagttggtgagcccccgaaggttggaatctcctctttgtggggttagggggtttaccagtgccagaaaggaagagagtgttaagagtggaattgtagggctctgttttgttttattttgtttgggtttcttttgtggggaggggttgttttttggttggtttttttgttttgttttttgttttgttttgtttttgctctgtctcatttctgtttccaactgggaaattttttttaatggcaagagaaaaagaagctgtgaaaagagaaaagcgagaggaaaagtagaagaaaaagaaataagggtgagaaaagagcagagacaggagaaaatggggaagaggaagaaccgatagagagagagagagagagagagagagagagagagagagagaaagtggagaggaagaggtcaggtacccaaagaatagaaaagctcgggccggggctggtggctgccggctgacccccaccctccccgcagaccatcctaaactccatgcacaagtaccagccgcgcttccacatagtgcgagccaacgacatcctgaagctgccttacagcaccttccgcacctacgtgttcccggagaccgacttcatcgccgtcactgcctaccagaatgacaaggtgcgcgcggcgggcggtgggctaagcccctgcactgacgcccctcaacacgtgcaggcccaaccgtccgttcatcgcccctcgaagccccctgcacgggatccgcgctcttgcggcccgcccccgagcaccgagcctcgcatccatacgcgcagcactcacggaagtcctcaaggcgccctctcaatcccaccgcgcgcacacacaggctcccctggggcgagcgaacagctgggccgtcgttctgatggagatgtttacttaacaattagctgagactccgggcccgcgctgacatttttacattttattcgtttatttcttggctcaggaatgagaatgtaagtgaagagagggcgcccgaggcaatctgcccaggctctaccgatgctcagaacccggggcccagttttcactctctcggggggagccagagggtgggacaggtgacacagccccccaaagcactcctggctactgctctgggtcagtctaggccccagaccccttgggaggcgcttagagaattaccttccaatcaaagggctttttctgcttgcggcttctccacccttgttctagtggggcagagcatcacccctctaggcctgtgcccttgtgcgccactgtcgagtgaaagagagggtacgagtgtccgtgccggtcgttgtggctttgtgaaccaaggtgtacgctgggctgtgcgtgccccgtttggggtgtgttggatacctgtggaggcatgtgaattcgtttggttccgtaggcgtttgttatgtctgtgcacacttgcgtgtgtgcgagcccgtgagtgtgatttggctttgtgtgtacctgcagccttgcgtgtgaactgcagtctctgttcgcgcctgctcgggtgcggagtcgtttaacttgcgcaagcccgcgggcgggtgtgcatgcttgggctggttccgacactgtggcactgctttaggcctgtgtggggctgtctaggcctgtctagggataattcctcgaatgaagcttttggaggacagaccccgtcgctttccgcgaggccctcccaccggcctcagctcggggcgtcccatcccaggcgggtgggtaccaagtggacgctccccgggtcttccctctgcggccagcacccgctgacctcggggtgccaccgaccacgctggaagagccacggcctgacttagcgccgcccccttggtccccgcagatcacacagctgaagatcgacaacaacccgtttgccaagggcttccgggacaccgggaacggccggcgggagaaaaggtgagaggccgaggacagcagccctgtggcgggtgcccgcgggagcagcgagcaggagggatggagggatgggctccccgctgacctggttcatccgctcatccccaggaagcagctgacgctgccgtctctacgcttgtacgaggagcactgcaaacccgagcgcgatggcgcggagtcagacgcctcgtcgtgcgaccctccccccgcgcgggaaccacccacctccccgggcgcagcgcccagtccgctgcgcctgcaccgggcccgaggtgagggtcggaccggaggagggacagggaggtggcggcggggggtcctcaggtcgctgggctggtcttttgctgagccacccgctaacctgaaaggccaggaaggaaacgtcggcgagtgtctgggatggggtttccgtcccgggactcccctacgagggcggtccccggtagccagaagatccggccggactccgagcctggccccttgggcgccgtgtaattctatagctgtagggtttcctctccagggctgggttccttccactgtaaatctggggtcttggattaggtgacctgcagctgccctttgcccgactccagcagctcctccgactcggcctccccgagagcagcccttcccgagtgtccctgatcctgctcgtcggcctccgcccaggcccctgtaatccgcgcgccctctccccgcagctgaggagaagtcgtgcgccgcggacagcgacccggagcctgagcggttgagcgaggagcgtgcgggggcgccgctaggccgcagcccggctccagacagcgccagccccactcgcttgaccgaacccgagcgcgcccgggagcggcgtagtcccgagaggggcaaggagccggccgagagcggcggggacggcccgttcggcctgaggagcctggagaaggagcgcgccgaagctcggaggaaggacgaggggcgcaaggaggcggccgagggcaaggagcagggcctggcgccgctggtggtgcagacagacagtgcgtcccccctgggcgccggacacctgcccggcctggccttttccagccacttgcacgggcagcagttctttgggccgctgggagccggccagccgctcttcctgcaccctggacagttcaccatgggccctggcgccttctccgccatgggcatgggtcacctactggcctcggtggcaggcggcggcaacggcggaggtggcgggcctgggaccgccgcggggctggacgcaggcgggctgggtcccgcggccagcgcagcaagcaccgccgcgcccttcccgttccacctctcccagcacatgctggcatctcaggtaaggcctgtgaccccgcggcagcgccagcgagggagaaggcccagggagctggcggcgaggccagcggagggcctgaggggtgccagggtcgctgggatcctctggcaggcaagaactccatccaggggaggccccgggatgccctttaggacacctgggttctgagagacgaggactgtgttgtaagtccaggggctggccagggcgccgcttctgactcccgtgtgacctttggcaagtccctgaccctctctgggcctgcttccttccctatagccccagcgaggagtgcggtgcccatcgagactcttctcaccctcacagaccagggccacccctggcttgtgaagtcttctctcctggcctcaggacatttttcttgagaacaaagacccttggctccctgtccattctgaaaggctaaggtggccagacagacaaagggagaaggaacatttgcattattttctggacagttgaccaccagccctcccagaggtctctggcccctcccaggccttctacgaagtcctctgtcctggtgaaggacaaggctggtctttcccctaccttgagttcccagcacccccagccacatgtcagggatgagaactcagctcttcaggccccattgaaattccaagctcccaggggagtgttgacgaaaatgtggctggggcacagtaaggagatccgatggggacagtggcctctttggttgcttgggtggaatattccctgtggaaagatttggaatctcttcattcattttcttccctctgaggtttctggcaaattgaacccctgagatcttatctcaagggaaggaaaatagcagttcaggtctgagaaagctcctttgcttcagcagcaaatattttaaaagttgggttggtgggtgggggggtggggggttgggaggcaggcgattctgaaatgagttttacacacagctcagtgttagggtgtgtggagtgtttgaggtatcaccatcactcatctggggctctgggctggaagggaagcctctggagaaagttcagggcccagaggtttaatctgcacccctgattatttgtgtatatgaatgcctcctccccagacaaactggtaataatcaccagcatcacagaggtcatgaggaagtcagggcttctagacacagcctggccaacaggtgcatgacccgggtgagaataccagcacctgggaggcatccgttggtagggctgctggtggttacattcccaggccagtgcagcccatcccagacatcaggtagagccaaatcccaagagaactgaagcctccctccttcctcccaacctgggatgccaggtctgaaatgcccagtaggacctgactgtctcaggagggggtattttctcaggcctgatgaagctgcctcttttcttcttcctgctagagccaggcctgaggctccctgggagcccagtgcaatcatcagccccctgccctcctccccatacccactagctctggggagtaagccattatctcaaaggtcaggccgtgcaccagccagacctcatgaactcaggaaggtgcttgtccaggagttcctggctgctgtgcccttcacaggcaaagactgcattccttcctcagctgccagtgaggtgctgccaggcattccctgtagaactttcaggccagtttatgaactggttggcacccgtgtcctcctcctggcccaggcaggagaaccatgagcaggcagaaggagactttgcaaagtgccttccccagcatgtgtgccctctgcccttcagagcctgcagataggaggggtggcgaggacactgttctcaatgagcagaacctccaagacacccaaagctgcctgtttgccacctggccctatgcctgccccgttttctccctcaaggccttcacccgtgctagggcagtcacctggaatgtcctttccattacccctgctgtaatgcccagcacagaacttgatggcaggcctttgcatggtagcctgaagcgatctcacccttctaactgggtttggccacaggcacactggctcatgcttacctgtgctgcctgtggttatagttatgcgaattgtggttttacatccctaaaacagaagggcacggtgtccaggggatagcacccagcccaacttcagaaagacttcaggcaagatgtctaaccctcgtcttgttctgtttcttccagggaattccaatgcccactttcggaggcctcttcccctacccctacacctacatggcagcagcagccgcagccgcctcggctttgcccgccactagtgctgcagctgccgccgccgcagccgccggctccctctcccggagccccttcctgggcagtgcccggccccgactgcgtttcagcccctatcagatcccggtcaccatcccgcctagcactagcctcctcaccaccgggctggcctctgagggctccaaggccgctggtggaaacagccgggagcctagccccctgcccgagctggctctccgcaaagtaggggccccatcccgcggtgccctgtcgcccagtggctcggccaaggaggcggccaatgaactgcagagcatccagagactggtgagtgggctggagagccagcgagccctctccccaggccgggagtcgcccaagtgaggggctgcccagctgctcccctgccacgcaggccacccgggctgcctgcccctgctgcttgggacgtgtacagcacagaatgagtatttatttaaataaaggagaaaagtgggctgcagcagccggaatagagcctcgtctggcaagtcggggcctgggacacttccctgggcctcaacaaggatcaggctgctggaaacacagtcacttgggagctgctgggctaggtccagatccgctccagcgtcaaggtggcatccgaaggtgtctctggtcttccagcgaggtgggagaggcctcatccagggcccagcggtccctgcagaagccagaaggtgcaggggccaggggtgggagcatcggagggagtcccagagccctggaccttgggcctagaccgcgtgataaaactgggttgagggatgctggaaccagttacgactgaagtcagtgtagacctgagctgggagggaacctgttagtctccccacctcttccctgaagagacaggcacccctcccagccgtggtcaacggagggagtggcacttctgccttgagtccccaggggaaaaaaaaaaaagatatttatgaaataaatggtaatttgtgtaaataagctttaaggttcccagaatatgcaaattggtattaatttattcaaaggtgtacattgctgtgtacatatatttagagattaactcatacatttaaagtttttttcattttacgtgagcatctatattgtacagggctgggggggcccttggctgcgggagaaggcccagagccctggaggagccaccaccccgccggcccctcgacccctcggcccctcggcccctccgcccgggtttggctcgcccggcccgcgggctccacctcaggttttcacttttcgctccggagcgagaacgaaacgacaaaaacgcaagaaaacaataaaacgctagaaagcgaagtgaacggcgctgtgcgctctgtgggtcgcgcggggctggggcgctgcacgcgcgcaaggagggacgagaggcggggacaaaaggctgcgcgcccctcgcccggcggcagctgcaccccggggacggcagggcggcacggcggcagggcggctggggcgctggcggagccgcgaggccgggcggcgccggcgcgggacgcggggtgcgtcccaggccggggctggactccccctgccggccgctcccgcagctccgcgcaacgggcctgggcacccacccgggccgggaggagagcagccgagcggcctggactcctggcttctgactccctttccgggaaaccacactggaaacccatctcctttcaatgcttctgggtgggtgggctgggaggatgggtgttccttgtccaacctctcccttcggaggaggggtttggctgtgtcccacccccgtactccccgccaaatatcgctgagcctagaattctttcccctctctctgcctcctgaacctcaaagacaaacatttcctccgcgtcagggctgttggctagagtggcaaaatctggactaaaaggtcttactttaactcatctatctaaatccctcttgggagagtggagagtggggtcagtgggctatttccattcctgcctcagtttcccctgtataataatgggcttggctggggtctctccggggtccagctgtgtcagtctccattaggctggtccttccccgagacccactcctgcaaggacagctgcctcccaccccgcgccggtgagctccccctccttgcccagctagcaggtgtctccagcccccacttctagcagtgggagctgggcgggcactcctttagccctgggtctggtcggtcaccgagcacgccacctccttcccagttctctcctctttaagccttggggaccctgaacgccctgccccaacaggctgcccaccttgggcactgcacagggtggggcttggggagggtgctggcttccaaaacaccagggacgttgagatggaggaacggtgatggtgaaggtggaatggacagttgggcccccagactcccaggacgcctttgtgggccgatacatttgcaaggagcgagagagagagaaccaggcccgcctcttcaggatggtgctgcccccaggccacgccgaatgcggctggagcagggaggggactcagccagtgcacgagtgggaggttgcagtagaacgtatcccaaccccagagggtgggttctggcttccctgcctcagacctgcgggcaggtccgggaacccgacagggacagagaagcccgttttccagcctaaatagaagctcgtgggcagcgcgtttgctggaggtcgctttgggctgaaacgcctctcatactcctagaggagcggcgcgtttgcgtcccgcggcttctcactttcagcaggacattaggagggagacgagagtcggctgcgcgcccgcggcggcctacgtacagggctgcggacaccagggggcagcaccgacttagggtcgcgggaggggtgcgggtgcgggcatgggcgcgggggaggcgggtgcctgcgaaggccgggcggggcggcctagtcgcggccgtttttaggccgcgtcgttgctgcagcaacccgggtggggtggggtgggactccagggcctcgagatcccccacaccactttcgccgccacctcccgccgcacatgtcccctccgagtcgcccacccggcgctccgcggggccccagctggtagcctgagtgcgactgcgggaacccgcggccggcggctgggccttgtcccagacaaaggctaggccactcccatgtccaattaagccaccctcctccccggcctcccagccctcattgtccccggggtcgccaattagcctaggcgcccggcgtacccgccgctccggtgccgcaaggcctccttaacccttcagggcctggcccggggtccttggacggcagagccgccggcacacgcgtggcaggagggccagtgctgggacgatggcgatacctgctggcggcctagcctgtcgcctcgggctctcgcgtgtggggcgtgtgaggtctaagagggaattgtgcgtgtcggtgtggggtggcgcgtgcgattcccggaggaactcggagatggagggtgtgagtgcaggggctccgagagacccctagcggctaagccgcccggatcccaaggcccaggggacctcatttcctctcgggttaatcggaatcttccgagccctcaagcccttcctcctccactcccccgccgctgctgtggagaaccggagccaccggtatggcctggccctgccctcccgaaggccgcagctcccgggcccgcctccccagctgaccgcgaactcctgcgtggggtgctcctggggcgggaggggcgcgctcagcctcgctctccccgggactctcacgctcaagcgccccggcttgaggccgggaccccctatttcccggttatgggacggccccttgagggacagcctctacgagccctggatttataccccgagcctgccttcctccgctctgggaaggacccaaaatccagtcccgcttcctccccctccttcgctgtccttggccccgaggtgcggagcaccggcggtcaggcgggatcccgcaggaggccgagcgctccctgctcgcaggacagggcggcagcggagggagcccccgccctcttgggaggaagcccgagctccgggtctcctgggcaccctcccgggagcgccttcggggtggaggctggttgccgggcgctgaacgtgtccgagcacgcccggggcggttttgcacttggacttccttttgggctctccggaggcgcatatctgttcctcctattggatggggccggggaccccaaacccactccggaagcaccgatttccagcgctgacggccgcgcctggtttcccagcgagtcctcttggcagctcccgcagctccccgccgggagcacgagtgggagcgaacccagagcccgcccaggcctcgggcctcggcaactcctcacaggtccacgagatggcgctgcaggccagggcccgggccgcggcctcacagcccgcctcgggcgagagcgggagatagactgcggaccccggcaagcggggcacggaggcacagccaccgacacaggcagagccgggtccggagcccggcacaggccgccgagggaccgagggactccggggctgcggacacactgagcggagggcttgaggctcggggtggggccttctcccctgctgccagaaccgcccggcagcgccagctcggcgaccttccaggctgctgcagaccccagcttgtcctcttctgcgcgcccgcggggctgggccctcgcgttctctctgcgggaagtgagccgccggcctccggcctcctgggcccctccgaagggggctgtggctggcatccgcagcgcgcggggcgcacggccctaggagcgcggggcccactcgacggtgaggacttacgggcgggataggggaaggatcggcggggatccagcgctcctccagcggagagggccccctcggctccgacccgccctcctcaccaccctcatccggctcttcagggcggggtcttcagggtcgagggcaggatgtgccctgtggagctgctcacctaagttcctgcctccataggggaggctttgggctgcgttattccagcgggaggtggtggggactggggagggcccaggggtcagcctgagaatctcgcccttggattaaaagccaccaatgctctgggtcaagtctcaatgggaggctggggatgtaagacccgttggctggggaatgccagagttggagggggtggggcttagaagcctgtttccagctgaccttttatgtccccagatgagctctggcaccctcagagattaaccctacacacgtttcctaagggcacacggctagaaagcagcccagttaacaccagtcgagggtcatttccactgcaatacagtcaccggctgggtgatgggacccaggccagatgtcgtccctgcactaggctctcagctcttttctctttcaaagtacagtgtagcagagaataggaccaaatctttggtgatttaataattatctacatgctcatctatggctgaagcagctgcttggtaggaaaactggacaggagatagataggtacaaggtcgaactctgcctctagagctgtgagtgctctttgaaaatgtgactttattctctgggctgcagaagcctcatctgcaaaataagtagtttggactaaaatccagttgatctgcgaatggccagttgacctgggtccagtttcccccccgtcccgcccccagcctcaactgcttcagagaagagccatgttcccatttaatgcttgaggaacctgagccagagggataggtggagtcacagaccttgaggaccttggccaagattcttggggtgggggactgggttggtggcctggatgaattcccaattaggaaattacattctaagtcccggctgcctccattccctgtggggtgcgattgtcagtcacagcttggccttctacctcgagcaagctgcttttggagagatgcagactagtgggttgcgggcgggggggcgggggtgactttggtgcccagcactacaatttgttgactgtgtgtgacttctctccaaagagagaccccaaagagagaaagcgataccaatgaaggccattcaggcacccatgtttaagggggtcccccaggctaatttcttacttgcgaggaagccttcatggcagtcaatgcgctttcacatgtggcctctccccgaccctcactggccgggtggagactatgagtcctcgtttcacagacatgacattggggttcagagaaatgaagtgaggtgcccaaggccatccagtaaataaaggacggagctctttcacaatcccttgggcctggcccttggaaactttcgctgatgaagtgatgatgggtgagagtcaggcttgcagcaggaaaagggcaaacggggcaggggagggagtgcccggatgtcctggccaggaggtgtgtccgtgggagaagcagcctggctcagagcccaagtccagcaggcccgggggagggtggcctcatggctccagtcagcccagctgggcctgcaaggacccctggtcgggcaggggcttctcagtgtaaaaccctaacaggggcgttgagaggattacccgagagggggctgcatcctgtgcttagctcagggcatggctcatgtttgctctcaatattatttatttctctcccaaagagaacaagcaggatgtcctctggctccatggtgcctgctcctcagcccgacaggagcagctgtggaacagccactgtgtgcttaataaacatgcagacatttgattgaattctcagcacggggtggctggtatgattatctccattttacagaggacaaaatggcccaaggtcatacagcgtcaaagaagcaggtcacagggccacaccaggctctggccgaccccaggcctgtgtcctttcctggagcctggcgttcctgctccacacgcctgggcttcaaagtccccctggcatttggctcagccctgtggcaggctgtcctgggactggtttacatttagccctggactggctggtcagttccttcatccagctcccactttgggtcttatttatttccttcttggggggctgtccaacacttccatgctttgcctgcccataactgtccccgtttgcccatgacagttctggtttgactattggcatcctgagttctgggagacccctcaggtctgagcaagttacccaataggtcaccttgccatcaccacacacatacccctacactgggccaggagacccagcaatgagtgaaacagacaccagcacccccattgagggagccaatgatctggtagaagatagagacattcaaggaatatatcccttcccaagagaagacacggcagtgcatggggtggggtgcgaaaaggcttagccccagcaaactgggggcagagaggagccgcagagcctcagagaggctggggagctggcaactggcctggtttcccaaggaaactaccccaccaagcatcttcatatgggcatgtctttgtgtgttcgtgtgtgtctgtgtgtggtaggtgcatgtgtatgtgcataacacatggcaggagtgccgaaagcccttgctggatgagtgaatgaagtgcacctggtccctccaggatagcccccccacccccaggtcctgggccagaggcccctcctccaagtacacttgagtaccctgtggagagctccagagggcttccggtctccccatccaggcctcctctgtctcctggggaactgaggcccagggagtgtgtgtgtcttgcctgaggacttgcctctgcaggagaaagttacaggccatccacagacactcccagccctcaaaccctgctctccagctgtgccagtgattctctgctctctaagggtctggaaacttctggactctggagcaacaaccttgttccccaaggccagggcagacctctctatctgagtcccttggggaagctcctagcatgttttcccccacaatctttcttgtggcacagacagccttcctgaaatgcagctgagatgaagtcactgccctggttaaagcctcccaaagccttcccttgctcttggggtcaagcccagcctccttagcctggcactggggcctgtgtgagtcctgcctactcgcccccctccccaggactccatccccactgcccacctctaggctaatcttgctggccttatcttggcctctgcatatgcacatgctttttcctgggcttggagtgctcttcctgccttcctccgaaaaactcagcccactagctccttctccagggaactcctctgccttcttcctcctgagttgggtgcccacgcacgccttgtttcgtgttggtagtcaacgaatgtatggacttgggcaagttactcctccatcaccgctgcaaagtggggataccagcacctgctcatggtgtttcacagtggggccggccaggagcctggaccagtgagtgatggttcccgtccctttgggggaccgtaagggcggctgaggatggggcctgggggcgctctgcgagtggggacattcccctcagcccagcgcggcggccagggttgggcctgcccccttcccctcctggaggccaggcgcgggccgaggagaccctgcctgaatgtgccctaaacctggggggttgagactagaggggtgctcgacaggcctgcgtgctgggtgtcttcagatgaagggcgacgaaatcctgagggcaatgagcctccgtgcgcacgcgcgctggtgacacctcctccctctcccagggaagcgcggccaggggaggggcgtttcttgccgcaggacggttgctggtgacccggccggattactgtcatctgtggactgcctgcgctgtgcgggcagtggctccctcctaccactaggtggggatctggagtcgttcaaaccaggagtccggggcttgggttcaggcctggagcccctcgccctcctgccgccagccagggtttcccagcctgcctgactgccgcctcccgggcactgggcccgcgctctgtgcctccactctcatttctagctaggtcctgctgccagagaataacattgaggcaaatgaatgagaacaccgactgtgcagcccgaggggcctgggttcaaatcccagctgcacctttggttctggggatttggctcgttgggcctccactttcctcatctctaaaatagactcgtctactcattctgcaaagggcaggaggaaatgtggctgccctgatcgccacccagagtggggggaatggacagtgttctgtcgtctgatccctcacataggacagctaacctggacagcacctgtgttccaagacttcctcatgctcttgtctcaccgatagaaacttacctgttccagggctccctccctggggaccttgctgggagagaggggcccatctgacttaatgcactgcctttccaggtgctgtgcttgcagcttccatctgagccagagtgggggacccatctggcctgggtcccaggggcaccattgcagaggcgcagttgtccccaccccacccccccatgcccatcacacaagggccctgcctcttcttcctccgtcaggctctgggtcaaggctgagggataatttcccttctcccccattcacaggcaggaaaactgaggttcagagaacccaggacaggttctatctgtggggaaaagggaaggtttggcccagggaaagggaacatggaggttggggttgttccttctaagtcaccagtcttggtcttggtcacgttggttcaggtgtccccttctcccatgcctcgttgatctttcccctgacataggagggatttgtatgacagtccccatctgttcagacaccggaacctgccgcgcccagagggagctgccctccctgactctcacccctttgggagccagaggtctcttccccagggtggaaagacagaggttaagaaggggttaactcttcttgccttcacatcacgacaacaagtatgtgttgagcaatggctgcagtgtcatgtgctgcgcatcctccctctttctctcacgtgctctggactccttgccattttttctttctttttaaaaattgaggccgggcacggtggctcatgcctgtaatcccagcactttgggaggccgaggcaggaggatcacctgaggtcaggaattcgagaccagcctgaccaatatgatgaaaccctgtctctactaaaaatacaaaaattagccgggcatggtggcatgtgcatgtaatcccagctactcggggggctgaggcaggagaatcactttaagccaggagtcggaggttgcagtgagccgagattgcaccattgcactccagcctgggcaactagagtgaaactctgtctcaaaaaaaaattatttgcataaaatgtactatcaaagggtacaattcactggttttttactatatttacaagattgcacaacaatcaccactgtcactccccagcccttgacaaccaccaatccactctctgtctctgtggatttgcccattctggacattttatatcaatggaatcatatactctgtgtttttttttgtgactggcttcttccacttagcctaatattttcaaggcttacccatgttgtagcacatattgatactttcattctttgtacagctgaatcatattccattacctggtgataccatgttttatttattcaccatcggttgatgggcatttgggttgtttccacatttgactattatgaataatgctgctatgaacactgatgtacaagtctttgtgtgaacatatgttttcatttctcttgggtatgtctaggagtggaattgctggatcaaataataactctaacatttttccccaccagcatccaaagcagttaatgctaactttttgaggagccaccaaactgtttatcaaagtgcctgtactatggtaccctcccacctgcaattccttgccatttcttgaatgtaccagacacacccctccttggtccctgacttctttcttggagaggccatcgttggccatctgatgtaaaacaggagcctactttcacccccttcactccctttctcccttcctcccttcctctgtttggttgttgatactggacgcgctgagactattttacttacttattttgtttattgctttccctcactagaatggagctttgttcattgttctatcattagtcctagaatatacctggcacatgtaggtgttcaatcaatgtttattgagtaacatgagttagtcaagaaatgtagggtgccatgctgggtacacaaggcatagcatgataagaactcatggaaatggaccaagtgctaccgaggccacagggaggtaaaccaagtgtcactgaggcctcctgcctgaacatttcttcacctattgagtcggccatgggggttcaggaccacccatgctctcaccctcatcagaccaacagagaagaagaactgggcctcctccctcaaactaggcaagggttcgggaaacaggttagttagccacacagtcatcacgacagttctgtctactggctgtagacagtgcaatcgctgagtgaaaggatttgaagggtggcaattggagagggtattcaagtgtgtcagtgccctgcgtcagccctgtctgtccccatccaggtctcagtctgccttggagacccagatgtgagagctgctcagcagggaaagatgttggccttttcccatgccaggagtgaggatcacagtcctggctgtccagccaacccagtgggtcttttatggcttcacctcagctggcctctggacatattagtcaggaatccttcagtcgtacggacagaaatccaactcaagctgaagaaaaagggcagtttattggcaagcacaggacctgggaagcacaggggaaggggagctggccttcagaatgctcgctctctctgtctctctctctctgctttctctctcgtttcttttctctgtgtgttggcatcactctctcctaccacagatgggcttcttcatgtggcagggggcttggctgcaggcagctgtgggttacagaaatccagcttagtggcttaaaaggaaaggaaatggctctgctgttctacttagaacaatcacagggaaacactcggattggccccctgggatcatatgcccacctccctccatacaaacaacccattctcctttgccactattgtcagttgtggctacaccagaaaaccaggcttgctggtctctctctctctcaaaatgcgtgctgactggcaagtactttgcaatctctctctctctcttttttttttctttgagacaggctctgtctcactctgtcattcagactggagtgcagtggcatgatcacagctcatcacagcctcaacctcctgggctcaggtgatcctccgacctcagcctcccaagtagctgggactacaggcacatgccactatgcccagctattttttttttttttaattttgtagagactggactttcgccatatttcctaggctagcctcgaactctttggcttaagcagtcttcctgcctgggcctcccaaagtgctgggattacagccatgagccaccgcacctggcctcatttctcttaatccacacaactgctctggagaaatatatactggtcagggctcttttagctcctactgacaaaagcccaactcaaatgagcttaagccaaaaagggaatgtattactctacataactgataaaagcaggagtagacttcaggcatagctggttccagggagtcaaataagcctgggctcttattggctccagctcttagccagacttccctctctattggctcagctctcaggtacatcctacccaagcagcaagaaaaaatgactagggcagcctaggctcagatggtctttagagccgttattcccaggggaaaagggagactgctttctgtgcatagagcaaactatctcgggggactggttggctcccatgagggtccaatatctactcagggaacaggacaaagaaaaccatatttggccaggtcaggtcatgtgcccactcctgcagcaagaggatgagacagagctgtgaggagtaatgccattggagtagtgacagggcagactgattggatgtggccagctataggactatcccattgcacagatgaggcttggagagataaggtagcttccagtaccgtagagctagagacagtcaggattcaaacgcacatctgtcatctcttcccagaaaaccaccctgcctccttttaaagtgctgagttaaaatatcccttgaagaagtagattcctgtagacagccatatcattcccagtaccccttgcagcaactgccatagagaggattgcttgggaggtggggtcggccgcactctcagacaagatcctttaccagctctccgtggttgaaagggtctctggtcattgactccaagtgtcatactaaatcatcaatccaaacaaggtttgatttttggcaagggtgccaagatcattcagtgtgggaaggatagtcttttcaacaaatggtgtgggaaaaactggatgtccacatgcaaaagaatgaagttgaacccttaccttacatgatatacaaaattaacccccaaatgcatcaaagacctaaacttaagagcgaaagctataaaactcttagaagaaatcacagcggggaatcttcatgaccttgaatttggcaatggtttaaaaaatgtgactctaaaagcatagatgacaaaagaaaaaacagataaattgaacttcacaaaattaaattacttttgtgcacccaaacacactatcaagaaagtagaaatgcaactcacagaacggaaaaaaggatttctaaataatatatctgacaagaatttaatatcaaaatatataatttctacaacttaacaacaaaaagaaaaataactcaattacaaaatgggcaaaggacctcgaatagacactttttccaaagaggatatacaagtgaccagtaagaacatgaaaagatgctcaacatcattagtcattaaggaactgcaaatcaaaaccacgagatatcactccacacttaccaggatgcctagaatttaaagagagagtgagccaggaatggcagcgcacaactgtcatccaatctacttgggaggctgaggagggaaaatcacttaagcccaggatttataatctagcctgggcaaaatagtgagaccaccatctgtactagaaagaagaaagaaagagaaagagagagagagagagggagggagggaagaaggatggagggaagagggaaagggagggaagagaagggaaggaggaaagaaagaaagtccaaacaaattggcaaggatgtgaaggaaaaaaaaatttttttttgagacaaggtctcactctgtcgcccaggcaggagggcagtggcgcaattataccttactacagccataatctcctggactcaagtgactctctgcttcagcctcccaggtagctggctttataggtgtgcactaccactcctggctaatttttgattttttgtagacaaggtctcactatgttgcccaggctgatctcaaactcctgaactcaagtgatcctcttgcctcagccttgcaacatgctggggttacaggtatgatccaccacaccagccctgcatgtggagcagttggaactcacgtacattctgttgaaaatgtacaatggtgaagtttctgtggaaaacagtatggtggttctccaaaaagccaaacatagagttaccacgtggttcagcaattgcactcttaggtgtacacccaaaggcattgaaaacagacactcaggcagatacttgtacaccagtgtatattgcagcattatccacagtagctgaaagttgaatacaatctcaatgtccattaacagatgaatggataaacaaaatgtggtatatacattcaatggaatatcattcagccatacaaataagtgaagttctgatacatgctatttgctctatattgtatatacatgctataaaatatagaaaaaacttgaaatcatgatgctaaagtgaaataagctagacacaaagggacaaatattgtatgattgtgctttgctgaaatatctacaataggaaaagtcacagaaacagaaaggagagtagaggttaccaggggctgggaggagagggtaatgaggagttattgcttaatgagtacagagtttccatttggaatgataagaagtttcagaaatagattgtggtgatagttacataacaatgtgaatgtacttaatgccactaaactgtacacctaaaatggtttaaatgggaaattttatgttgtatatgtatattttgtcccaacattaaaaatatgggggctgggcatcgtggctcacacctgtaatcccagcactttgggaggctgaggtggacagatgacttgaggtcaggcgtttgagaccagcctggccaatatggcaaaaccccatctctactatagatacaaaactagccaggcgtagtggcgggtgcctgtaatctcagctacccgggaggctgaggcaggagaatcgcttgaacccaggaggcagaggttgcagtgagcagctgcactgtactccagcctgggtgacagagtgaaataaataaaatataaaaaataaaaataaatcataaaattaaaattaaaatagggcatgaacgtaacaaatgtacccctctggttggggatgttgaaaatgggggaggctgtgcatgtgtggggtacagagggaatatgggaaacctcttatgaatgaacaaatttgtatgaatagacaaacacctttctctcgatttggcagtcaagcgaaaactgctctaaaaaatttaaaaaggatatgcatcttgcacatagagaggtctacttgacaatttgttttccaacaaatatatattgagcaagcattcaatgcagtcgtctggttggcactgggaggtccatgacacagttgtgccctcagggggcctggggctgcagtggagcttgccaagttctcaaagagagaggggagctggatgagaaggacatgttgagagcaaagaacatgaatttgcctcctcagtgtttccaaactgcccagggcgttgattaaaagcattaacgtcatccaagttccatcctgacctactgagtctgaacgtgcttggctggatctccattcccaggtgggaatccaagccagaggacttgaactaggagggagtgagaagggccgcgcagcttcctccctgcccatggccagtgaggattcaccaactccattctctccattcctagagcctcatgccctggctgccagaagttgccctgtctaaagctctccttcaggagaagctcagactttgtgtccatcttgggagaaacagaaaacagctctcccgccctctccgtctcaccatctttcagaagcgtaaaggcttattaaaagcttctgcaatttgggcaaagtactgatcctttgcgtagatggtatttctgctcctctggcctgaaaactcaacgctaacccagtacccctggcgaacacatccaccatgttgagaatggtgggtgtgggggtgtgtgggagaggttctgccctctgctcactcaggcctcaggagccgaggtcaccatgcacctgctactctttgggcatccattttgttttcatgggccaagctctggaacggggaaggcatatgtggacagtgggcagagacattgagagacggtctgtgtctcagccagagatcacctggcacctcgggttcagccactagacctcttcttaaggctggctggcactgacttaggcatccccagcatgccaggcctttgggcagagggcaagagttcaggcctcagctgttcttcccaacctagaagagggtagctgtcttctatttgagcatatgctttgggatcgtattttaaaatcctaaatcaggacagcagacctgataaataatttgtgaattgatcgatgtgtaaagtcctttaaaagcatccaagtcaaatccgttacatattaaatacatttcttgaaaagagtgcagctaaagtgactctgtcctggaaatgtgaggccaggggttcttaaacaggggcaattttggaccccatgggacatctggcaatatgtttggagacatatttggttttcacaacctgtcaccagcatctagtgggtagaggccagtgatgctgctaactatcctacaatgcacagggcagcccccataatttggaattctcaggccccaaatgtcagtagtgtcgagtttgggaaaccttgctctccgctctctggggctgtgcctgtgcaccccagggtgtccgcccagccttggttttttcctcgtacttcatgtctactttggtactgtctgtgacactattgtcagaggggagaggcttggaacccctcagctctctgctgcttccttttttgttggcagatgcagggagatgactacctttgaagaggtgacccagataccaaggcaagcctggcaaggggcagggggtgtcttgagtaagcatctcccactggggagatgaaagcagggaccggatgcagcaagagggtgggaaggagcactggatttagagggagaggcgcaggctccaactctgtctgactccgcccctaacctggccatttagcctctgtgcctcagaggcattgtccgttgggcacaggttctaaacagggttattgtgagggttagggagaggaaggatgggacagggttgtggaaagcactaaggctgggcagcagcaacttgtggagtccctgctgtgtatgctgacttaggagggccccagctgggctggcaggttgggagagggtagggctgggccaagggaagagtgtggaacgctgggagtgcgtgctctctagttacagtgatgtgcagacaactggtgtgcctggagcacagaaaaggactggctggcaagatagtgccgggcagcatgtggagcctcccatttgggggcgctgctttcctttgtagctctcagacagagggagcaggaggcctacatgagcctggacgtgcacccaggcctcttgcctggaggttagcgcagggaatgatgtgctggagcaggtgggctccgtgtatttggccaaaagcaggttgaggttgggcaccatggctcaagcctgtaatcccaacactttgggaggctgaggtgggaagatcacttgagcccaggagtttgagtccagcctgggcaatatagcaagaccccatttctaaaaattttttttaattagctgggtgtggtggcatgcatctgtagtcccagcctggaatggctgagatagaaggatcacttgagcctaggaggtcgaggttgcagtgagccaaggccatgccactgcactccagcctgggcaacagagtgagatgccattaaaaaaaaaaaaagataaattagatttgaaagtcctaaaagcatccgtgtgtgtgtgtgcgtgtgtgtgtgtataatttttaatttaaaaaaaattttttgtttttttgctttttgttgtaattttttttgagacgacggagtctcgctgtcacccagactggagtgcagtggcacaatctcggctcaatgccacctccagctcctgggttcagcctcctgagtagctgggactacaagtgtgtaatttttttagacgagatattggagtacagaggtcacatttgctgcccagaatttagaaacagacactcactgactaggagtgtgacccttgggctgttattcagcttttctctacttcagttttctcatttacagaaggtgagtcatagtgatggggccaaaggaatgcaggagcccactgaaagagctcctgtgatccttctatctcagccattccaggctgggactacagatgcatgccaccacacccagctaattaaaaaaaaaaattttagaaatgcggtcttgctatattgcccaggctggactcaaactcctgggctcaagtgatcttcccacctcagcctcccagtggccaaagctagaacaatttgagcaacaaaatacataacgtactactgaattataacccaacatataacacaaagatccaggagttatactgagacaaataaatgattgagtgaaataagtgaatcaatgggaaagaatagacaaatctgtaaagaagaactccaaatattgatgtagatactccatgcttaagaaggtggagtgtaactccccactcctgaagcgtgggctgtgccagtgatttccttccagctactacagtatggaaagggacaaaaggaaacctttcgcagtggaaagctggcaaacactacctcactctggtgaccaaggctagcatcattagtgagaagtcataacatgtcttcaatatgattgatgagaatgacaccccacttctctggccttcctcccccaaacccataacttcagcctaatcataagaaaaataccaaacaaaccccagtcaaggaacattccaccaaatgcctgacagcacttcctaaaactgttcaggacatcaaacacaaggaatgtctgagaaactggcatagccatgattagcctatggtgacatgataacaaaatgcaatgtggtctcctggatggaatcctagaacagaaaaaggacattcagtaaaaaaagctaagcaagtctgaaagaagtgtggatgttagttgtgacaaattggtatggtttggctgtgtccccacccaaatctcatcttgaattcccacgtgttgtgggagggatcaggtggaggtaattgaatcatgggggcagttttctccatactgttctcgtgataatgagcaaatctcacgagatctgatggttttataagcttctggcatttcccctgcttatactcattctctctcctgctgccctgtgaagaggtgccttccaccaagattgtaagtctcctgaggccttcccagctatgcagaactgtgagtcaattaaacctctcttctttataaattacccagtctcagatatttcttcatagcagtgtgagaatgaactagtacacaaacatactatattaatgtaagatgttaacaatagaagaaactgggtgtgaggcagaatatgggaagtctatgtgctgtttttgcaacttttctataaatctattctaaaaatgagtttctttttaaaagtaagtaatagtgtcacattatgttgctgcattcaataagtgatttatatcaagcatttggtgcactggtatatggtgtttaatgttagctattatttattactattgttcttatttctacttttcttattgagtatatgagtatacatttttcttattaaaatagcagtgtatactcattacagaaaaatttacaaatgagccaaagaagaacatccacgaccctacactctcagagagaaccactggtcacaccttgctgtggatccctcccaaggtgtcattaatttttataaagcttggatcactccatacatacagttcagtaaatggccataatttatttaagtaacacataaattatttgatatttaggttgttctaactctttgctcttacaaataggcaagagcacaagtaatggactaagcattaattaggaagataaaagaaaaccctgaaaaattataaaaactggacactaatgctgaaataagcacggaggatgctcagtagttaatcaaaatgaccttatctgaaaatccaatggccgacttttcttttctagatctgttttatttcataatttaaaaaaattttttaaagtaaagagggaaagattacctggcaaaatttgtttttagagcttaaaaacttcatttatttatgatgatgagaatttttttaaaaagctaaatttgctcaatggattactataggcattttatccctacctgtgcattctttttaaaaagtatttatttatttgtctattttgagagcatcattttatcctttttattgtatattttaaggtgtaccatttgattcgatatacattgtgaaataatcactgccataaagacaactgacatatctgtcacctcacatagttacctttttcatgtgcatggtgagaaaacttgggatctgccttcttagaaaatttcaagcatatagtacagtattgttacctatagtcatcaggctttatattagatctccagaactcattcatcttgcataactgaaactttgcaccctttgaccaacatcgtgtaatctttcccttcccccagcccctggtaactatcattctcttctttgtttctaagagtttgactattttaggttccacacacaagtgagatcttacagatttgtctttctgtgtctggcctatttcacttagcataatgtccttcaggtctatccatgttgttgcaaatgacaagattttattttcttttttaaggtgggataacatttcattgtatatgtatgcaccacattttctttattcatttttttcatttttttattttttattttttttaagactgagtttcattctatcacccaggctggagtgcagtggtacaatctcagctcactgcaacctctgcctcccgagttcaagtgattctcctgcctcagcctcctgagtagctaggattataggcgtccaccaccatgcccagctaattttttatttttagtagagatgggatttcaccatgttggctaggctggtctcgaactcctgactttaagtgatccactggcctcggcctcccaaagtgctgggattacaggagtgaaccaccgcgcatggccttattcattcattgttgatggacatttaggttattttcatatcgttgctattttgaataatgctgcaatgaaaataggagtgcaagtaacttttcaagaccttgatttcaattcctctggacaagcacctagaagtgggattgctggattatatggtacttctattttaattttttgagaaactttcatactattttccataatggccataccaacttatatccccaccaacagtgtacataagcgttcccttttctccacaccctcaccaacacttttttttttttaatacaagttgagtgtcccttatctgaagggatttttttttttttttttttttttttgagatagagtctcactctgttgcccaggctggagtgcagtggtacgatcttggctcactgcaaactccacctcccaggttcaagcaattatctgcctcagcctcccaagtagctgggattacaggcacccaccaccatgcctggctaatttttgtatttttagtagagacggggtttcaccatgttggccaggctagtcttgaactcctgacttcgtgatccacctgccctggcctcccaaagcgctgggattacaggtgtgagccaccatgcccggccgcgcattttggattttttttaaaagcttggaatatttgcatatatgtaatgaggtatcttgggaatggaacccaagtctaaacacacaattcatttatgttttatatataccttatacatatagcctgaaggtaattttatacaatgttttaaataattttgtgcatgaaacaaagtttgtgtacactgaaacatcagaaagcaaaagtgtcacgatctctgccaccaatgtggataatctgtggttgtttggcatcatcatcatgcctgaatctgaatgtatatgctactaattaaacaatcatttttttacatttattcacagataagtacttaacagtaaaaaatatgacttaccatttttttttttgagacagggtcttgctactgtgtcgcccaggttgaaaggcagtagtgggaacatggctccatgcagccttgacctcgtgggctcaagcaatcctcccgcctcagcctcccaagtagctgagattacaggcacacaacaccatgccctgctaatttttttaatttatttcttatttttgtagagacagagtctcagcatgttgcccaggcctgtctcgaactcctggctcaagcgatcctcctgctttggcctcccaaagttctgggattagaggcatgagccgccacacccagccaacaacagattttgtcttagaagtgtctttttgattttataaatgaacacgatttcttgttctgttgtgaatgtatgctgctttagtccttcaataagcccatcacacattttcaccatgccatctatagacattttttctgcaaaaaatgttaacaatgtcatcttcattgccactattatcatgatcactttggtttggagccatgtgtctatttcatcatcagccaatgagtaaacaactggagccttattatcaatgtcaaaaagccctttgctatctacttcttctaacttactggcagactctgaaggtatattttttgcatatgaaagaaagccatatatcattttgttctcacttgacaccagttctttctcacttgatacacaattctccaaagtcaccaccttgttcatcatcatcactgaacatagtcaaaggtcagaggtcgcaccaggcatgcacaactatgtctttagtcactgtgttctaagcgctggcaacagtatatgtggcgtccttcatgtcacctccttttgaaaaccttctgcactcatgcctctgttcactgctgctagcattctgttcaataaagtgattttacatctactcttcattgacctaaggataccctagtcacattgaattaatgtagtcacatctgggggaaagtacatggcataaacattattttttgtgagaatttcagctggagaatgagcagaacagtaatcaaggaataacaaagtcttacatcatcacgcattccagcttccctgcagtgagtactagccactggtacaaaatgtttgtgaaaccaatcataaaaggtgtccctgatgatctgtgcctttttgttagcataatagtagactggtaagagatctcctccttgataacagtgaggatgcaagctcttgccaatcacagcaagtttatacttatagatgcttgctacattaacacatcccagcagggttactctatccttggcatctttttttttttttttttttttttaagacggagtctcgctctgttgcccaggctggagtgcaatggcgcaattctggttcactgccaacctctgccacccagcttccagcgattctcgtgcctcagcctccccagtagcatgcgccaccacgtcctacttttttttttttttttttgtatttttagtagagatgcagtttcaccatgtcggccaggctgttctcaaactcctgacctcaggtgatctgcctgccttggcctcccaaagcgctgggattacaggcatgagccactgtgcccggcctatcactggcatccttaattcctgtctcatcaagtgtagtcggtgtctttctggggaaataatgccaaaacagtgatatttcatcagcattatagactagttctggtgtcagatttttgttagtgatgactcgggcaaacttgtcaatgaatttctctgctacttcatgatcagcagatgctttatcaccacaaatctttaaaaatttaatgctgtcttttcctaaatttctgaaaccagcctgttgaacattcatagttcccttcaattttcagttcactgtgatagatctttgcttgtttcatgatcagcaaccagtatttactgcaacacttttgaacccattctttcaatacatgatcgagatcttcattattaactttatgcactgtttttctttttgttattgttggtttttttttgttttgagacagtgtctatgtcatccaggctggaatgcagtagcttaatctcagctcactgcaacctccacctctccagcccaggcgatcctaccacttcagcctcctgagtagctgggactacagacacgcgttaccacacccagctaattttttggttttttgtttctttgtttttcagacagagtctcgctctgtcgcccgggctggagtgcggtggtgcaatcttggctcaatgcaactttcacctcccaggttcaagtgatttgcgtgcctcagcctcccgagtagctaggattataggcacatgccaccacacccagcttatttttgtgtttttagtagagatggggtttcaccatgttggccaggctggtctcgaactcctgagctctagtgatccacccgccttggcctcccaaactgctgggattacaggaatgagccaccatgcctgactgatttttaaatttttttttgtagagatggggttttgccatgtggtccaggctggtcttgaactcctgagctcttgtaatctgcctgccctagcctcccaaagtgctgggattgtaggcatgagccactgcacccagcctgtttttctatttttgtttttttttttattaacttctgttcattgctttcagcatagaacttcaacagtttatccttctgtttcttcaggtcatatgtggtggtcattccaacaccatactcttctgtaagacatttcatacttacactgctgtccagcttctccaatagcttgattttctgtgctatagataaacataactgtgtcctctttttctctcctgtgttgcccacaggagtatctgtaggcctttctgacattttcaataatatctttacaccacagagcagagaataagccaaaagaaataccacagtaagtaatgcacataggtattggccccatgtggggcattgtggagaacctgaaattggtgcatctggcctccacaccattttaaaaatgggtttttaaatgggttatgccattttataacccttggtggatgtgcttacatgcgaaaatctggacatgtacagaaaagacatgtcacagctgaagggggatgggggtggcttccccattggggatgctgaatgaactgtgtgttgtgtgcctgcattttcattatggccaatcatatgaggttagatgtagaattttccacttgtggtgacatgttaatgctcaaaaactttcaggttttgaagcatttcaggttttggatttttagagtagggatgctcaacttgtaatgaccatcctgacaggtgtgagatgatatctcattgtggctttgtcttgcatttctctgatgattagtgagcaccttttttatatacctgttggccatttatatgtcttctttggaaaaatgtctattcaggtccttggtccatttctaatcgggttatttgtgtttttattgttgttgtttttgttttgctattgagttgtgtgagttccttatatattttgagtattaaccttttatcagatatgtggtttgcaaatatattcttccatcccataggttgccttttcagtttgttgattgtttcctttactatgcagaagctttttaggttgatggagtcccacttggtttgtttttgcttttgttgcctgtgcttttggtgtcatatccaaaagttttagctatgccccatgtcaaggagcttttctcttatattttcttctaagagttttacattttcagatcttatgtttaagtctttaatgcattttgagttaatttttgtatatggtttaagagtgggatccagttttattcttttgcaggtggatatccagttttccctgcaacatttattgaagagtctatccttttcccccattgtgtattcttggtgtccttgtgaaagattagttgactataaatgcatgggtgtatttttgggcttcctattgtgttttatttgtcattgtctgtttgtgtgcctgtaccatatttctttgattaccatagttttgtaatatagtctgaaatcaaagagtgtgattcctccagctttgttcttctttctcaaaattgctttggcaatttggggtctttggtggttccatatgaactttaggattgttttttctatttctgtgaaaaatgccattggaattttataggaacttcattgaatcagcagactgttttggagtatggacaatttaacaatattaattcttctaatccatgtatatggtatatcttttcatttatttgtatcttcttcaatttttttcatcaatgttttctagttttcagggtacagatctttcacctccttggttaatttattcctaagtattttatttttttgatgctattgtaaatgagaccattttattaatttcttctctgggtagtttgttgttggtgcatagaaatgcaactgtattttatatgttgattttttatcctgcaactttaatgaagatgtgtattagttctaacagtatttagggttttctatatataagatcatataatctgcaaacatacaatttaacatctttctttttgaatttcttttatctattcttcttgcctaattgctttggcaaacacttccagtactattttgaatagaagtggtgagagtgggcacacttgtgttgttcctgttctttctttttattattattattatactttaagttttagggtacatgtgcacaacgtgctgttcctgtccttaaaggaacagttttcagattttctttgttgaatatgatgttagatgtgggctgtcatatatgacttttattatgttgaggtacattcctctataactcatttgttgagagtttttaatcatgaaaggatattgaattttgtcagatgttttttctgcatatattaaaatgatcatatattttttatcctttgtttgttaatgtggtgtacttcacttattgttttgtatatgtcaaactgtccttgcatcccagggataaattccacttgatcatagtgtataatccttttaatgtgctattgaattcagcttgctagtatttcattgaatgctgtttgtttattgattttctgtctggatatctatccaagattgaatgtagcatattggagtcttctattactattatattgctgtctgtttgtcctttcagttctattgttatttgctttgtatatttaggtgttccaaagttgggtgtatgtatactcacaattgtaataccttcttagtgaactgacccttttatcattcattatatgatgaccttctttgactattgtgacaggttttgacttaaagtcctttgtgcctaatataagtatagctacctctgctctcttttggcttccatttgagtgcaatagccttttccacccctttactttcagcctgtgtgtgtcttaaagctaaagtgagtctcctgtaggcagcatatagcaggatcttgttttttagtcattcagctattctgtcttttgattggtgaaattaagtcatttatatgtaaggtaattattgataggtaaggacttactattgccatctagttgttttctgttttgcaattcatttgctcttttctctattgttgtcttcctttgtgatttaataattttttatagtattttgttttgattcctttctctttgtattttgtgtatctcctacagaattttttctttgtgattaccatgggattacagaaaacattctattgttataatagactattttaacctgataaaaacttaactttgatcacatacaaaaactttaacttcttctcccctacatttaatattattaatattactgtttacatttttataatgtgcattcattagtaaattattgcagctatagtcatttttaatacttttgtctttaaacttttacactggtggtaaaagcaatttacatactaccattacagaattagactattctgaatctgactatacatttacctttgctagcaagttttatactttcatatgtttcttatgtttagtgtcctttcattcctcctccttcttcttcttttccttcttccttcctccctctccctctccttcttccttctctcttcttcttcttctttccagtgctggctgatatcctttcatttcaacctgaagaactttctttagtacttcttgtaagtagtaatgaactccctcagctggaaaagtatctctccttcctttcttaaaaatagatttcctatgtagaatattcttggttagcagttgtttttgttgtttcagcactttgaatgtgctagaacatcaactcataatgcaaatgttgttttgtttcatgttgtcccataagttacacaggcctttttcatcctttcttcttattgttgctctgattggataatttcaaatgatctgtctttgagtccactgcttctttcttctgcttgagtcccctgttgaagctctctattgaatttttcagttcattcatcatattctacagctccagaatttctgtttagttcttttttatgatttctatcttttggttgaatttctcattttgttcttgtattgttctcctgattttgtttagttgtctgtgttctcctgtacctcagtgagcttaagtcacttattttgaattatttatcaggcaattcataggtctcaatttctttgggatcagccacaggagctttattttgttcctttggtggtgtcatgttttcttaattcttcttgttccttgaagtgttgcatttctgtctttgaaaaagcagtctcctcttccagtctctactaactggctttggaagagaaagacattcaccagacaatcaagagtttgacgtctttcaggccttttctatggattcacctgccccactctcttgttcccccttgtgggggtaaggcttaggattgtgtgcctactctcaatcctgtaaagtcaggccaggtgtggagggcctcctcttaattttctccaggaaagtgccttgaagtgttcaagattgtgcaccttctctcaaccctgcaaagttgagatagctgctgatatctatgtgctgtctgtggggatttgcatgtgtcctctgtggtggcttgcactcactatctgtggaggctcaggtgctctgtctcaggaacgcataaatgccatctgaggacttttgcatgtgccatttcaggggcacatgcagagtgctgagggtgtgagtcatccaattgaaggtgttgaagatgaggcatcctacagggttttcatggttttcagactcctggtggagtctcaaaccaattaatagggtctacagctggtttttgagactttgtggttgctcctacctcccccaagacttttagctgtgtgatcttctgtgatctgggtggggtgaggcagaagtgagcctcttgggtaacaacctgtgaggctggggaagctggacactcacttcactctcactatcccccatcgaagaaactgtggacttgggcactgagccatgctgccttgggagtagggtgatgtgggttaagtgaaactgttcttcctctttttcttttttttaggtggagtctcgctcttgttgcccaggctggagtgcagtgctgcagtctcagctcactgcaacctccgcctcctgggttcaggtgattctcttgcctcaacctctggagtagctgggactacaggcacctgccaccatgaccaggtaatttttttttttttttttttggcagagtctcactctgtcacccaggctggagtgcagtggtgtgatctcggctcactgcaacctccgcctcccaggttcaagctattctcctgcctcagcctctcaggtagctgggattacaggggtgtgccaccacgcccggctaattttttgtatttttagtagagacggggtttcaccatgttggccaggctggtctcaaactcctgacctcaggtgatccgcctgcctcagcctcctaaagtgctgggattagaggcacgagccactgtgttcttaccttcatcaacgcatctagtcttagttgttttttcttttctttctttctttctttttttttttttttttggcttaaacagagttctataattgcttcactggactcctggtttcctacttgaggtactcttcttgtccatggatggttgtcaaaattgatgtttctatggaagtatgaggactggagtctcctattccaccagcttgctgtcatcactctggcaaaaatgtcaagtggttatctcttttgttttctttgcagtctgccataattaccagattctttccaatgaggacattttactctaaagtagtagtaataccatggacaatgaatgagtctaatctttttcaatcaagttcatttcactttcaagtaaatctatttactctgtagtgttgtaaatgcttcccaaatatttaataacttgaagtaaatgagtattattttgctcattttacagatgaggaaactgaggaccagagaagctaagtagatcacccaaggtaatacctgagatgtatggacccagtggccaagctcaaccaccatgtcatgctgtcctcaaaccctctgggccaaattgcacatagtttacagcctgtcccaggctgacaaggaggtgacaattgcactaagctttatgattctgaaacctggaatctggaagccatggaattccaaaagtctgaagaggccccctcttaattgtgtggctttgggaaagtcccttacctcccctacgccttggtttccttatttgtaaaatgtgggtgataccatctgtattctttcctactcctcagggttgttatgagctcaggtatatgtgaaaatgttacataaactgtgaaggatgtaggtaggcaggaaatcaagggagagatatcaaagagatgctgtgtgaacaaaggtgcattaaaaggactgtgaaggccattgtgagggagctgtgtgaaagggaatttggttcctgaggaggagcagtgggactggggtagaaacaggtttggtgttaaatcctggaggactttaatgtcaggtgatgcactgggatgttactgacagtgaaataaggagggtgggctatgaagagtcatccactgcaaaaatacagcatgattgtcgggttgtcttcagccactctgctgggcctctaggcccgactcttgagtgagtctgagagagggagctccccaagacaggccctctgggcaggtgaggattccagtggtgtatagtgacttgctggcaagttttagtcaatgcccatgagagggaagctggcacaggaggccagcattatggttctttccagaagcccaggaaaaccagagtgtgagcctctcccatttggtgggtccttccaatttatggtagccagctcatttgattctccaacagcctggaatggagatgaactcttatcttccctccactaatctgctcttcctaatgtcaccagtgactctaacttcctcctcctcgaatcctccttaatacagttgccagtagtttacattgctgacttctcccttgctcctaaaaagttcttttgcgaccaggattgcactctctcagccagttttttaactgattcttctcaggcccctttgctgatttcctttcttttccacaccctccaagattccattcttggtctccttttctttttcaatgaattctccctcagtggcctcatcaactaccagtatgaatgcccactgtgtactcatgtgtctcaaattgtgatctccagaccctgtatttcttatcatgactaaaatgaaactcatctctgcccatactcactgcctattctctcacttaatgtcatcacaaccacaaaaggttctgtgtcaaagctgtgacaatgtacctggttggttttagcagagaggggattttttggaagcatggggcaattcactgacatgaagaaaattcttgaaggtcaagactcataaataatgaaggccagagcagctctgggaagctgaacagtggatacaagtgaatggcttccctggggaatgaagactgaagaatgtagtagaagaacattacctaccatgtagtgtttgttgaatctaaaatgaactgtacagttaaggaagccgaggcccaaagaggatgattcaacttccatcccttcattctttctgccattaggctcgagattagaattacaggaagaaagcatctgaatgcactaactagggtcacatggtcttagctgggggtaagcacaaccctttcagtgatggtcctaacaaattgtaaatcaatcctgatattgtcaatcttgtttttaaaagcctctagagaatgattcttcctcctaaaactcaacgagcattctgaacctgaaaagggggggatgaagtctgggtgtaaaaatatcacaactgtccatcatactctggcccagaaacatctttaactcctgcctcttccatacttcacttctcctaaatatctttctaataacttccctgccctcataactccttgctgccagtctctacctgcaaatctatttgccccactaccagtcatcttctacaatacattctgggctgggcgcagtggctcacgcctgtaatcccagcacttcagaaggccaaggtaggtagatcatttgaggttaggagtttgagaccagcctggccaacatggtaaaaccccgtctctatgaaaaatacaaaaattatctggacgtggtggtggacgcctgtaatcccagctactcaggaggctgaggcaggagaattacttgaacccaggaggtggaggttgcaatgagccaagattgcgccactgcactccagcctgggcaacagagggagactgcatctcaaaaataacataacataacataacataacataacataacataacataacataacataacataaataaaataaaataaaataaataaaaaaataaaataaaataaaatctgatcagtccaagcttctccttccctccccctgcccccaaaaagaaccctttatggtcccccattgccattagctgaagtttttaatatggtttacaaggtccttcccaagccttatctttccacaaggcttcatttaccactccagccccactactcctgaaacaggcctctctatgcctatgtctgtattcttcctttctcctggatgcctttcccacattctctgtctcgaaggatcccattcatattcgtctttcatagatagcatcagatctcacctctcatggagacttcctcaaacaagccaggatgagttggttaatccttcttttgtactcttttcacactcagtaaggacttaagattatagccctgagcacattttattatggcgtttgtttacaagtctgtcttcttcactggactgggagctcctctaaagtaggccctgagttttccttggctttattgccctagtgcttagcattgtgcctagcatgtggtgtttggtgaatttcaagtgagctgtaccgatgaggaaactgaagcccaaggagaacaagctgcacacttagaatgagcaacctccctaatggcaatcaagttggagagacagttgtgatcaatcacattgggctttgtaatcatctaggcagttgctaaagactggaagtaaagggtggtcaccagctatctccctttgcactttgagaaaataaggctcaacaggctcaaacttaaatggtcaagagggatttaaattaaagaagagaaagaccttcttgttcctgggtttggtagacaaaaaagtgagctgactcagaacgtttgtgaactttttgcctctggagacttttacaaacaagatagaccttattatcagggctgagtcgaaagtcctgttagaggcggacaaatggctgagctgacgtctgaagaagctgcctcttgaggaagcccttgaggggcagaggaaccagtgagaagacttcagttcccagggaggtcaaggatgcttgggggagggggagacagaggagggagcccttcctaattaagcctctacccacgagtgaatgtgaggctaataaggcagccccattccagggcacctccacacccagccagccggtctgcctgtttattgcccgtatggagatcattaatgcctcctgacactggggtcactcccggggtcaatcccggagccccttctggaaaacaaggggaaatgaacttcccagcacatgtggctcagccttggcagggagggggactctggtcaccccacacctcagctctgggagagatcagcactccaggcagtcagaccccccgaaacaatcccttctgcccatgctggactcagggggggtggtcctggggaaaggcgaggtggaggcccttgtctgggccgggacaacccccactgaggctgtcccaaccgacagacagacactaatcccctggcgacggactgggctggtgtctgggagctgcagctgcagctcaacaggggccaggctgccggccacaggtggcgggaaggcgcaggcctggtggccacgtgggcgcgagcttgggcctcggccccaccctcacccgcttccccctcgttgattgggccccttccccttccggaatccaagatggtggggggggggcgggcttccagggcaatcggagcttcaattggtggaatgcaggccctttgagctgaaggacagcctcagtagccactcagggagctcatgctggtgatggtggtgggcgctcagccaccttacctcacacttaagcagccgaggtgacctcaggaatcggtctcccgcaggctggcgagagccacagtgagaacgaggaaactccagacggcctccgggcaggccccttaccagcctggggcgtcttcctcgataatggaactgagaatcagtccctacctgcccggcaagaagacgggaaaaacctccaactaccttggaggaaatcaataggattacgaggttaatgccagagcaggctgagtgacagttaccaaataaatgatcttgggaggacatggctgaggttaaacgaggcccaataaataaaggagcgtgttcaaaggagaaacttcagaaaatgcaaggacgccggaggcgggggtggtggtcgggcctggggactccttcctgtcctctcgtcggggacctgttgaatctcccagaggagccacagccccgggcctgcctttcacaacctgcccactcgggtctgcaccctgttccgtgccagtgttggcatagctccagggcacagcactccttggacagctgcatccccccagctttggagactgaatgagggaatggaaagtcttaccgtggaggcctgaccagttaacagagccccagcgtgcctctgactccttagagaaaggaccaactgcagcaagaggggttgaagctagatgtgaggaggcacttcccaaacagattgatggacagagcttatgggccttggagacaaggaagtttcccgtaggccttcagctgagtgtcttttcttcatgaaatctgctatagaacggttttgatgactgagcagtaagcaaagtcccttctccaatttcttccaaatcttcccactgatgcccacatcaagcctccttccattcccttttctactgtgcctgcccctttagaattggggattgaaaaacccaagcacagagagcagctctgggtgagtggggccggaggcagatgggggacgtttgaggaagagggcagcagggagaagaaggccttggtgacatgggatgggggcactcaggaagctccaggacacgcttcttgggacggcaattggaaaagaggcttgagcttggtacagactgctagaagggccctgtgatgtggggaaggagcggaaggcaccaaggacgtgccttttgttggagtttcattcagctttgttgccatgagtcatttggctttgtgtttatatagtgccttcatagtaataaatcagactcaaggaaggagagagaatggtgttctgagcccccggtgcaaccctgtggtgtgtccctccacacccagggctggattgcctctggggcagtaggtctgtggccaagtaggtggggtgtggggtaggagaagagggttctttgcccggtggcctgttataaaggattttattccagatgaaagcacaattttccttatcgtcacttgtttctgatgtagtcaagaatttccctttttaaaaatttgtgttttatagagatagggtctttttgttgttgtttgttgtttgttcgtttgttttttgagacggagtctcactctgtcacccaggctggagtgcagtggcacaatctcagctcactgcaacctctgtctcctgggtttaagcgatactcctgcctcagcttccaagtagctgggattacaggagtgcaccaccacatccggccaatttttatattttcagtagacacagggtttcaccatgttggcgagcctggtctccaaatcctgacctcaagtgatccagctgcctcagcctcccaaagtgttggtattacaggtgttagccaccgcgcccagtggagatagggtcttgctattaaatatattgctcaggctggtcttgaactcctgggctcaagcaattctcccacctcagcctcccaaagtgctgggattacaggcctgagccattgtgctggcctaatttgcctttttttgtccaaggctgtgttctcagctagaaagggccatcaacatcatctttacacatgaaaagcttgcagcagagtctgtgtgtacaaccctcgctcttcattccgttagcaatgtgtcctggtgaatgagcaccccactcctggggtcctgctggctttcttccagtagctaacgtggtaggagcccgcaggagacagagaatgatgttcttaggaacatcaaggatactggaagtgccctctcttggaaatctgaagagagagatgattaagtttttggtccctgggtgagtattttattttttagcaaatgaacaataataataatgaataggttatgatcttgggctcttgagccctataggtccaataacctctttacttactgtgagaccttggtcaagtcctatttataatgatacctgtatttgagtgttaccatgcgccaggcactatacatgttactcttacaacaacaacgtgaaggaggctgtgttatccctgtttaacaaagaaaacctgcttaggctaagaaactggagagcagtttacttaaaagcataggcactgaagattcaaactagtttggctttaaatcttgacttcatttcctggttgtatgacattgggcaaattatgtgacctcagtttcttcatctgtaaaattgggtttatgatagtaaccacctgataaggtagtgaggctgaaatgagataatgtgcataaagttcttagaattctgccaggcacattgtaggtgtttgataaatgttagctataattgtgagccctcaaagtacttttatctatgtgctgtcacttcatcctttctgctaccctatgaggtggctattgttattaaattcatttatagatgaggaagcagagccttaaaactctgctctagccttaaaactctgacctagaacatgctgtagacctgaattcaggcctttaaacttcaaattccaagcattttctgatagtctcccattcttaaattctaatttattttagcccctcattcagaaatatccccaaggagccgaatttaaagccaaatttggattatctatgcttgggaagaatgcaaaggagaaaggaaaaaaagggaagtgttgaacaattaaataatatctctgatttaggaatttttttcacctagcacaaccctaggagatataccttcctctggtagtgaaataagcatatatttcagagaagtcttactgaaggaaatggaaggaagtgaggattcaggagcatgtagtgtaaggatgggggaggggaagctgaccttctagagaaaatccaccaaagaaaaaggtctctggatcaggaggtctagattgctcaggctatgcaaaacccagacttgatcattcattccttacctctgtagtgtctcaaatgagagttaaaggagggatccacctgtgctgttggtgaatcactgtctctgccctcagtcccaaaggggctcagaccagtctgcctcacccagctcagagatgaaggcagcccagtcctcagttccttctacctggaagtttctggttctgcctgacaggagaaggcctgagagagcagggtgagaggtcaggtgagcagacctgcatctgtggtgtgaggggaagcacctgcagtagcagcagctgccacctctacccatcccctgcttggtccttctccaacctcccagagggagctcaagctcctgccccacagctttcctgagcttgctaatctgaatgggatgtgggctgaggaatctggaaccaagacttggggctactgggtgacaataaagctacaggaggacaataaagctacaggggacagatcaattccctgctgcctcatccatcctttcccttttggaggttaataaggatcctaggccttagaccacagcatacacagaaaaacatagctgggaaagaagtgaggagggattttgtgtcctggttttgaatgggaagacacgagcacatgcgcactcaggtaagtatctttcattatggaggaaggcactcagcactgagctggtgaagcaagaggatggcttgagcccaggagtctttgaggctgcagtgagctatgactgcatgccagcctgggcaacagagtgataccctgtttctttaaaaaaaaaaaaaaaaaaggaacactgagctgggaacttttacatatgcttcaggagtatatttagctgtaagtaacagagatccatccagactaacaatgatgaaaagaaataaggtttatttttcttatgtataagaagcaggctggcactggtttacctgctcaatgatgccataaggaactcaggccctttctgtttttccttggatatccttaacatattgactttcatccttcttccttaaggtctctagagggtgagaacttcaaggatctcatctgcaggggaaaggaagatcacatcttcccctttatcaagaaagcaaaatatttcccacaacctttctcccctccagtcttccgtttaggtcttattggccaacactggattacgtggccatctctagctacaagagagactaggagagcagagaacaggattttcatagaccagtggttctcagccttgcctggaactcctgggctcaagctatcctcctgccttggccccctgagtagctaggactacaagcggcgccaccatgtccggctttggctctactcacagagattctgactcagttggtctgggttagagcttggcattggtatttattaagtgctccaaaaacctaatttttttaaaaaattgtaattgcttttcactacactatggtgccagctcatcctccaccaaaaggtcatcctcaaccaaagccaccccaggctctagggagccaccctactgtgctgactggcatccccaacttatcctgtagcccctgctgtctctgagattgattatttaggtgattaattactcagcttgcaggtcattcattaatgaatttgctgttagtgatgggttagtcaagtagttgggtaactaacagaatggtcagttggcctttcctcctgtttgtgtgtctaacacatagtaagcatttgatatttctttggatgaatgaatccataaaatagagaaaaaaatggagttaatacagtatcaaatgagatggcagctgtgaaaccactttgtaaatggtaaaacactgtacgatataacaataaacatttacattagaaactacttttattttttctttatttttaaattttatttattattattatttttgagacagactctcactctatcatccaggctggagtgcaatggcactatttcggctcactgaaacctctgcctcccaggttcaagtgattcccctgcctcagcctccagagtagctgggactacaggcatgcgccaccatgtcttgctaatttttgtatttttagtagagacagtgtttcaccatgttggccaggctggtcttgaactccaggcctcaaatgatccgcctgcctaggcctcccaaagtcctgggattataggcatgagccactgcgaccagccgagaaactactttttaaaatttagggccaggacaaagtctgttccttcaccattcaccaaagagttactgtttccacatttctgatatagagaactaccatgttgctctgctggctcataagccagattttattctcaattatagcaactttgtcagcacttagtgatagcatatatgcttactcctttttccttgatcctaatgtgtttttctacttgtgtttttattagctaattctggttataaaccacctcaagccttttgcggaaaagagaaaagtagaataaatttttaaaatacttgggagctagcctttatcaaccatgcattaatataggcaatcctcacaataagctagtaggttggcgtaattatccccattttatatgagcattaatgaacttgcccaaggtcacatagctgcaaaatggtgagccaggaatcagagctaggtttcaaaaccaaggtgagcctgctaccaaacctgagcactttcccccaagccaacccaaatcagtgtgaccgatgtgtggcaccgtcagttatttgtttagctagttgaggagggttttcatattttgaactcctcaaagtagttttggagaaaaaaaaattggtcttctcctcttctacacaggctctttttcagcaaatactatgcagcatccattataagcttttctattattttacatacgactaagaagaaaaaacgctgctaattaagctatgacacaccgctagctatcagatgcatctcagtttcagagataccagaatgtgaaaaatgtgtgtcttagagtcagttaaatgaggtattccattctaataatggggaatgtgcatacagaaccgctctcatttactcacttgctggctggtttgccccttcctttttactgccaaaagcttacctgtcccttccatatctcatttctccatgtcatcatgaacctgttgatattaatttagactgtctgccatcagtctccagaaagccttgcacttataggaaggttccagtctagtttgtttgtttttgtttgtttgttttattaaagaactatacgatacgatctcagtatgaacttcctccaatgactgtcaacaaattctttccagagtctggcctagctctagtcttcccatagtacctggtgattcactgccctccctgttcaccattccacacagtagttggttgcttagtctgtatactatttatttgcaagggatttccctacaggctgttggagaggtcatgggagggggcttgcgagcagaagctgaggcatgtcatccaggtctccctaacacaggaaacacgactccccaggcatctcctgaaacgccagggccttccctttctccattccaggagtccgcaggtttggggaaggattctgctcctccactcctcttagatattatttcccctccctggtttgagactccatgagaggaatggtgatagggtggtgggacctggtactgcaatggtgatagggacttgagcagcggcccactgttgaggtggatttcaggctcctgacagcagcagcgactggcttttctgagttggcgtttttgcttccacctttgagtgcagggtggtaaagaaggcattgatgctggctttccatttcctagcattagaacagggacagacccatccaggaaaagaatttccctgtcctctccccttcaagctgattttgaggtcagaatctggaaagggacagaggctggttgaggacactggtggagggagggatgcagcccatgctaagcactaagggaccactctggggatccttattgatgaggattctgctgtctttgcagatgggtgggcaggcctatttctgccccaggattctgggcatgtgacaggcggggaggctggggcacgggctggggtccgcatgggtccgtctgctagtggaaaggcagcgtcctgtgggaggtacagacagagagaaacagaggtaagtggagacagagagctcagaggctgggcagggaggtctaggtgctgagcgggactccgtttctgaggcggaaagaaccgggtggctgggagcaggacgctccccagtctccacttcctagactagggcaggcattgggcttcctcttcagctctccaggatctcaaggagctgccgcggaatcctggccctgggccgcagtttccccaggaggctctgccaagcctggcaccttgcagcccggcctgggctctgtcaaggcccgagccggactcggctccactcagaggccggcccagcacttccctgccgccgccgccccgcacccggccaccgggcttcctcccagtcctcacccctgacctccgcggccgacttcgaggcgcgccaggccgggtccagcgcccgcggccccctgggccgggacaaggagggcgggtgagcagaagggccgtgcccagggcctggaagtgcaaggccgcgtggtgggcatggtagggaagcggagcgtgggcctgtgaggcgcgtgtgcgcctgcgacctcgggaccggggctcccaaatgaacagcgcgcacagctgggagcagggcttggggagcggggctctgcggccggggatccgtagaagccgctgcctggaagcgggcgccggcagggggtggccagacccggtcgtggagcgtcctagtcttcgggcacggcggggccaggcgagccctcctggttgtcgagcctcggctgagagccgggctgctcgcccttgcttcccgcctctctaatctaaaccatgcggggctcccagcccctacccggctcgcggggcccgagggccaagaggagggcactgggccgcgcggtggaggagccggcggctcgcgtggggctcgggatcttggggaccgcgacgccggggaaccctggagcccccctccccgggggacagcgggcgcagactgattgacagcggcgacgtcagcgcggagggggggcggccccagagggagggagggaggaggagggaattgaggccccaaagtgcagccttggagatcaagggcccgctccagagccgggatgtgtccagccccgagggcacggcaggcagctggaccctgacccagcggcgcggagtcggagccccggccgtcccgcgctcctcggacccgaacctgcaggggacctcgggccgctggcgcctccgcatgcggcaccgcaattagggtgagtgtgggttccagccgagtggggacgagctgggcgtgcggggctggggccacaggggctcagggttaggctgcggggacggacaggaggatgagctggaaaggggtgagtcacgcgacccggggaagaacttcaggggcggtcaaagttgcaggaaggcggcgcgaagtgccttgggtcgggccgccgcctcggcccgacacccagtagttggggcacgagccctcctctctgagtaacgcgatgaattgggtctagagatccaagagcatagaaatatcgacagcgccagcaccctaagaacaaggccgtgacaggcggagcggtggcctggaaattggtgtttgcagaatatgcaaggccaaggaagagggccccggtactggagcgaaaatccgtgtagatatgtgagtgatcagaacactagactcagagcctttgatgcaatagactagtcaaaattaaagcaaggaacattatatataaataatgatcgatgattaaagattattggaatgtgaacaattaccaaagaaagggctaatcggcataactgatataacacgtgaacttccaaataatacaatcatagtcactttcagaatcaagtgaaaatagtaatcacaatttttaaaaggattaaagacaaagtaattctaaatagaggaacaatgtaaggactgtttattaaaaccaattgcactaatataacatatagtaatagtgtaacaaattaccaaactgtaggaaactagcaaacgaactgtaggagaaagatgaacaatgaaaatactattaagggaaatactattagtggtagtgatataataatataatgtattattgatactacagtgaactattaaaagaaatattaactaaaatcttaggagcaatagtaatataaataaagacatattaacaagaattgctggagtaatatgacaatttatgaccaatgtattaatagtcacaagaacattataaataatggttgagtaataagaagtattgtaccaatgtgatgaaaaataatcagagtattaagagctacaacaatattacaaagtatgacaaaataacaagaagtaatgatgtgatgagtaactagcgagttcagatctgtaacattacaaataatgacaaagtaacaagatactgtcggggtgtgttgaagaataatacctggagtgttatgagcaagcctaacaaaacaaattgtggttagataacaagaagtattataaggatgtgagggaaattaacatgaattttgagaacaattatataacaagttatggtaaacaagaagttattgaaacagcgtgacaaagtataatcaaaatgaagagcaagcaacggaaacgtattagggatacaaagcaagaataaaaaattacaatagattaacgtgacctattgttcactatgtcacctcgatattggaaatagtattatgaatgtgccaggcggccctgaaatgatggaacagtgacaggaaaacaacaaatttagtaacagtaagctaacgaatcaaagcagggctttaaccatacagtattaaagatacaaagtagtaataatccacgcgataggatattctcaaagttcccgaactgatcaaaatactactatggtaataaggacaattaaaatattttaaaaagcacgaaatagtaacagttcccctagtgcaagaaacatatccccagtaacctaaaaatgaaaagagaaatgctgtcgtctttggaaaacgaggcagctgaaagcaacagaccccatcgcaaaggcagcggaggttgcgggccgcacccgcggaggagtggatgtgaaggacgagagcggaccgctatgcggtgctgagtgcgggaccccgcggtgctggcggcggccgagcgcgcccaagctcgaggtccgagaggaccgcgaggacggccgccccgggccagccgggcgtggaaaaaaggaaattgctgggaagggggcaagctgtcccgaggtctggatgtggcttcgtggcggagagaaaaggaagaggcaaaccctgagcccgggagggagagcactgagcaggcctcgtccccagtccgagctgcgggaccggcgtcagtggacgcgggcggtgaaccagctcctcacagggcagggctgagcgcgtaggactgagagcgcagggcgcgagccgcagggctccgctgcacggctccgggtgtgacaagagcccagcagaggaccccatggccatgcgggccaagcgcgagacggcccctccttgcgaccccgcaggccgccacatctgggaccagcggatcgcttggtcgctggagccgatcccgccggggccctagatatagttggacccagcgcgctggccggagcgggcagctaccctactggcgcagcggccctgtgtggggactcctaggtttccgaggctcggcccgcgttcgcacgtggcccgaggcgggtgctggcgctggccatgtccagcgagtctcactccctgcaggctgtggccgaagactggtccgcctgtcaaccttatctttatgggtttttcccaacccagactggccccggcccctttttatctcctgggttgcacttggcttgtttactttgcgaggtcctgggagtcgaagtctaagcccgggatgaggaggcctctgaacaagatgggcgagaggcctgagcccggggatgctccgggagggcccggggagagcgggaagaaggtaggaagagaaaggcggggcattccgcctcaagaagggccgtcagacctacagaaagctccgctggagcgcccaggtccagcaggatggggaagagcagggaggtggaaaggggaagcggagcaagcggggcacacccttaagggatgcgggcaggctggcctctcaggctgtgctctcatcccgaggccccaggacctgcttcgggcagggagcaggcacctgagtaggcgagggaatcagccaagacagccgaagaaatgtagctgtgccaggcagggctaagcggttcctgtgaatgggcccagcctgctggcctggtccttcactgggaagggtgtgggtctttaggcccaaagcagagccctgtggcgctaaagtgtgcctgagtgagcctgtaggttcgaactcgagcaccaggtaggggaggcctgggctgagggcagagcctggatcagtcacccaggagagtgtggctgctcaggctggtgggatgctgtgtgaggggctgtgtttgggtgtgaggatgtctgtgccagaacgggaagaggatgtgtgtggacggggagtgtgttggagtgaaagcctttggttcaggaagtctctacctcagtgctgtctgaggggttgggtgagggcagatgggtgagctgggcctgaggtcctgaggccctctctgcacacaggtgtggagctgcaggagcctgggccctgccctccagcctggctctcctttcctgcatggccaggaggtgtcctggctgtcctgggcccacagagaggcctggaccccagttattggggaacagccgagaaggcccaggcctcaggctccaccggagctcagtaggagtgagggactcggggtgcagctgtggcaatgccgagagggcggtccctcccctagacctactcatcacagaaccccacacccaggggcaggcagacattgaactgccgcagaccctcccaggtccacagcctgaagggaggaggcgagggacctgccttccttgcgggttccctcctccagctcaggagggggcggggtccacgtgctccagggctgcctccgcgccccgcacgaagtcccggaatcggctggagagggccaggggtcctctggcgagtgtggacctgggcgagtgactcgttgtgtgctgtgcccgcaggagatgctgcaggataagggcctgtccgagagcgaggaggccttccgggccccgggcccagcgctcggagaggccagcgcagccaacgcccccgagcccgcgctggcagcgccgggcctcagcggagccgcgctaggcagccccccgggacccggggccgacgtcgtcgccgccgccgccgcggagcaggtagggctgcgccagccgtcgggtagaagtcgggcgtcggtctgtctgcggggccgcctgtgtccgtctttccgtccgattgtcggcaggactcgctttcaggaggacctggctgcattcaggacggtctgcccgttcgttctccactggacatggctcgctttctctgccttttgggtccttctccactttgagccctcggggctactctgggacaagcaagagctagagctagagatagaggagagggcggtaagagagagggagacccccgtagcatctgagcgagcctggaccaagtgtccagctccaacaacccgtagagggcctgggacccaacggcgagggggcaggaggaggccaccccgccggtgcgcacgggagccgctgcggggatccgaggcctctgggacgtcgccgagggcttcacagtgataatcggacgatcacagcgcacgggatgccgcctggggatctgtgtgcactatctgcaggcgcgcgcctggccgagggtgcgtgcgcctctccctgtctgtgtctgccccgggagcctgtggcgatggcccgccacagaaatgttcatgagtgagcaggagtgtcgtctaacctgcgctggccactatgtgtgtcctctgagggttcctccgtaggtgcagctttaaaggaggaagttttagccaccgattaattcttttatattcacgaatagttcaaaatcgttctgtgaaacgaaatctggagccatgggctccgggcgggcagggttccgcacagctcttcgggtctggttcttctttcctcaggctccgcgtggagccctgggcctggcagacacaagtttctctccctcccatccccagaccatcgagaacatcaaggtggggctgcatgagaaggagctctggaagaagttccacgaggcgggcaccgagatgatcatcactaaggctggcaggtcagcgctgggagatttacttccggggatggcggtggggagcaaggggggccagggaggtcccttagaagtcctctcggccccggcctggtggcctgtgggaggcctctctgcctcctcgggcgtcagtgccacctcccttcgcagcttgggactgggccgccaaagcccgcagggggccaccgcagccgcgcgggccttgcgggaaagaccgaggggaggggcagcgctatgcaaatgaatccaaacagggatcgcgacgctcaaaagtcccagctccagcacttttggccccctggggggctgctttgccctcctctctttgaggacctgaggaggtttctcaggaatgcattgattggagacccagagatgcctctcagcagatggggagagggaaatagactatgctgttcagttttcatacattttcgtgagtgactcgaaccccaagtttttcatcccaggggcgccgctcttctgtttccatccccatctctggccaacgggaaagcactacgttgggctccgtgtgtgttgttgggggagcggctctcggtggctgccagaaaaggatgatttataaagtggaaacatctttaaaatgcgctggtgtctgtgggagagaacagggaggagaggatgagaggaggaagactcacggcgggggtgggggtgagtgagagattcgctggggctggtggggtgggggcaggagtgtggaggagaacggttatcaggtgaaggtggattgctgtagacagagacgctggcaagttcaggttcaggaactccctccccacccactctatcccctgcacatacacacacttgatttctgtccctgaggacagattaggtgtgaaaatgtccctttgcctggatgtgtctcataattgggattttgaaggaataagatgatgaaggctcaagtgccaggaatttggagtcagaccacggtgggtgagggctgcagttccaactcagctactttcatctgtgcaacctcagacaaggtgcttaatggtctctgctccctccccactccatctgtaaaagaacaggtcttgcctcatacattgtatgtaaagcaccaagttcctgtcacatgcaagcacacaagaagtgctagcgaataatattagcaataattagagaagtgtctggcgtcccactcagtattttcttctactttttagagaactcagctctgctgaaccacttagtgaatgatagactattcaaaggaaacaaaaagccggctggtttgctgtgtgcagcgtatggggtgctgtggtccttcctctctgctccctggcaggccttataaagtttcctttcttttgttgagggtggaggtctgggcacttggccaccctcaggccttagccagggaggtggcatcaccactcagggcctctatcaggagagaaagtaggtttagtttagggcttgagcttgctgtattttggggatggagatagggaaggaagacacatgaaggggctggcagagggtgcgacatggagcaggcattgaggacagtggaagccaggtgtcacaggccctgcctctttctggctgagtgtacttgggcaagtcacagtctccttgtagctcagtggtgtcagggaaatggtgaccgtagacctatctgctgtcccttccttttctatcactgtgaaactcaaaccagggaatcacgtggatgatggttggtaaatggataatccacttgatcaagtgcgaaggggaatggggctatttcttgtgcctgctagtgtggaaagaaggtaagaaagagaaaggttcagaactgccatttttaggcagcagaaataaccttgtctcttgaaaataactggccagcatgttctctgggcatgtctggcctttggcattttaaacaaagggcatttttgtttgtttgttttcctcagtagtgtttcctgcatctgcatgggtcctcctcctccctctcccaacacatacacttatacacatacttccataggtggccagcttcaggcagatgtttgtgcttgatcctagttgaggcttagagatggaccttagggaattatgataatatttctaaaatggctgtgatgatgttggccaattatggatccatcacagcctttcacttctctggcagaaagttatccttgcactgggtctggttcttaagaaaatcactagtctcatgcccccaacccctcacccctcacagaccccatttcctccttcatagctgcccccctccttcagcaaccactgtattgctctgatctacgttactcaggctgtggttcttcaacatcctgtccagtgcctctccctgctccccaaattctgtgtgcctctactggaacccttcttggtacacgtccatttgtcagcctgggccctgctgctaaacctggaatcatagcttcctagatggctagagctggaggagaaccaagagaacgtaaaccaaaccccagagaagggaagttaggcagttaccaggtccacacaggaaaacagatgagacaccccacccccagaacacagcccctactttgataagttcccttgattgcttttttacggggtcctattcagtgtggattgtggctctgccctagagaccctggctgattagggacacgataactgccatctggctgggtaggagcaggccctggaaaaggggagccagaatgttctcaagccaggttgagttctcagatcacaagtttccttcctaccttagccctttgggtccttgagagtcttgaaggttgacagagagaagaatccctttcactggatagtgactttgaactgccaaacaatttggcctggtggataaaatgccaaccacagtgggagccaccagtttctgaatactcagcgacctccatgtcaggtgtgaaatgggggccacagccctccgcagcccgtctcagtctcttgggtctctgtgtccagagggttcgtgctgatagccgcagacagcagatccctctcttggcctccccacatccctgccaagcttgatacatgtgagaaactgcattttctcccaaacatagataaaagtgagctccacaaaaaaatttaaatataaacctccccaaaatgaaaattgcctaactgtctcactgccctactcctaggtcagggttttgccaccagataaatctccactatcagccttcatagcctgttgagttcaatgttgcttgtgttagtgacagtgaatttgcgtttgaaaaatgaactaccgatgagaactcctgttgaacctgtattgtttgttattctgaggcaaggatttggcccggcttaatccggggcttcaaagccaattgccctcactctgtatacagagcgtcagagcccagtggcgtggatgataagagaagtaagggttgaagacactgggaaagtgggttggggagagagtgctttgatctctttttaaagtattttctgaaagcaaaagtctatcagaaggaagtgcctttaaaaaaaatctaagagaagcaaccgatcttccaaaacaacatccattccacacactctcacccctgcccctccctcagggaaaagatttcttaaatatgctttgggtgaattagaaaactgtgtgtgtatgcctctatgtatgtgtgtgaaacgtggaaatcgatttattatcttcaaaatcagaactcacttggctacagaaggcttggtctcagtgtaggtggcaccagcagccccactcctaaccccagccttggatgctgggccctggcctcttccccgtacacccaggattcctcctgaaaagcccccacggacatcagggttggagaaacaaagggttttaaggggacccctgccatttcactgctgtagggttcttttcagactctgagctccaaggcgcctgtgtatgtgtacacacatatataatttttaacctaaatgtattgaagtggaacattcctacagaagagtccacaggtcttaagggtgcagctttacagacttgcacaaaataaacacactcgtgtaaccttcatccagataaagaaatagatcatcaccaccaccgccccagaatccttcttgtgtgcctgcccagtcagagccatccccacctttgaaaccgctctctagacttctgaccccttctggctggtgttcccctacattaagggagggtccgtgtagctgttcctggagtccccagggacctccgagaaagtcggggctgcagcggggttggggcttgggggaccctccaggtggagagaatctaggggtatcccctagtctctgtccctttccccaggaaaggggctgagagtaagcgccttgaatttggccaccgctttggccggggagctcccgcggctctcgcagcgcagctagaacttgcgtgttccctcagcagtgagttcgcagttacgggtttgttgccagaattaaaaaagccccaaacccttgccccgcgccccgcgcgcctccaacaccgagaaacgtccgaggaagcttatcttagcagttcattctaaagccatttccgagtatgaatagataaaggctccagctccgcaccctttcagagcctgtttcatgatcagaggagaagccccgggctttcatctcctcccgggccggcgagcaggcggcttgtttattcccctggcggagccgtttccgcgtgtgccgtggggagggcgggggagcccccatctgtctgggggcgcgggagcccgacggcgcgaggggaactgggggagcatggagagggcgcttggggcgcggagagaaggtgcggggcacgtggaaagcgtgccgaggggctgggaagagggagggacaggaggacggggtgggagcagggagagggtagggggcatagggagagggtgcagggaggggagagggggagcgcgcaaggagggggctggctggggcggacccagaggtagagcgcagagtgcccgggacaggcgggcttcaccgccagcgctggtggcagggcctgcgtggacacaggcggcacacacagtgtcttccttcttggtcacctcccccaccccaacacacaaacagggaggcgttgctttccaccgtagggtgttggttttcaggtacattctatgtcataaatcacagaaacaatttacatctcactccatcatttcaaacctttcatgagagaggcagagctcacaggaagtcacagctcccaaacccagcctggcctctgtcgcctgaggcatgccacgctggggaacacccccaagtcaggcgtctaggcaccaactttagtcccttcaagaacccaagggcagatgcccaaggggccttgaattctcccctcgacctgggcaggaagccaatggaggggacagagggggcctcactttcacaggcagccctttcccaacgctgggtggacccttcctccttctggagccacctaggcagggaaacggtagtgcttagggccccccaccccaccccagagtgggttctgcatggctcagaagcagtcccccaactagaccctgccaagacctagacatctgttgcattgaaggcaatggaactccctgaggcagttcaggccacagcagagggcttttgaactccccattcagaccagacatcctacgtccctgtccctcggcttctgagcgctgctgccttaggtagaggggaattggtgggcaggggaggcgaggctgggaggtactccccttccctgtgccgacgcccacatctccttatcagtcaggaatctggcctacgatcagcttccagcaggggccaggtcccaagacaccagctggggctgcagagaacaggctcctcaaaggccttccagaaagcacttagttagtgtcagcctggccccctgggctgtggaaatgaagcccagcagggagaaggagaggggaaggccagggccccttagcctcctctcagcctaggctatgacgcgtgccaaagtggcagtgagcccttcgctcctggccccctatgtggacactggccctggagggaagccatggctgccctctgctgttgccacctggaatgatgacaggaaacaagctgagtgcaggcccccggtgccaggccagcccaagtatggccagggctgccccattttgtggctgtttctgtggcagttacaaaatggtggcctgcagggggcgggattcttggccttaccccagggaagggggaggtgaggcagctgctgccctccctgcttcagctgttggcccaccaggagagaggcagggccgggaaagggtggtgcaagatccagctgcgcccccaggccccataggggggctggtaagcaggaggcagggttgggttcctgagcccctcacttcccccattcctggagagggggtggggtgggtatttgaaaatgctttcaattgacatctgagacaaattcttccacaaggtttataagtccctagacttgcagctagaacttccctcctccctccaggcacgcacacatccacacatgcgcacttgcacaccgctcacatgcgcctgggcacacacaccccacatccccacgtccccgccctgcagtgcttgcacaggcctctcctccagcaagagaggggcacaggcggggctgggtggggcgtgggctggcaaggaagtgaaccctccacctcggtcggggtcctcgcctgggcttagggcccgccagcttatagaggccttgatcctttctggaagccctgttctgtccaggtaagctggtgcccctggtgacaaaataggggcctctgatcagctgtttgtggcatcttggacagcttctccagggtcccgtactgtcttgggttagtgagaggcagagaaccacctgatggttgtcccagagtggaccagccgggcagtggcacagctcagtggggcttagtgtcttcactgtgtcttcagctaggtttggatcctgtttctcttggggaacacctttgtggaagatcagctggggtgggggatggagtctgaggaggatcgtgggaagttccgttcttccctctggtgaagtcagggacctagtgactaggggagggagctgtgcccagagcgtttgtgtatgcgctgtgctgttgtgtgtgcgtatgtgctgaggggtgtgcggaagccccctctagaatgtgcctcgaacctcagggcccttgacagcctcagcatgggctgcaggaaatgacaaactttctgggttttggtgaatccattttcacagaagtaggtcataccacttctccatttactttgctgagggaggagtgcagcaggggtccgtggtaattcacgcagcaatctatgagataggtggtaatgttatcctcattttagagataaggaaaccaaggcacagagaggttcaagcaagttgcctaaggcttatcagtggggtccaggctgtgaccatggcaggtggtttcagaatccatgccctctcttatccatgaggctcctggaccgactttcccctgatactcagggtgcacaggtccaggtgaggtgttcacagggagaagtacccccgatagacacactggaagaacccaaacctagcagggttttggacagcagtctcctgttttcctgcaagctggttttaggcctaaggatttccacagaggcatgacccagaggaggcagctcattatttatggaagcagctgacgggggtttccgtccccctataactgcaccccagaacttcacttgtgtgtgggctggcaaaggacaggagggaaattaaggcagcaaggttggcgtcagaatctgctcccacaatcctgactggggtctctgtgcttcagctgctcatgggcactagccccaagtcttaggggattatgggggaggggataagtgaatttgggaaatggtgtaaactctcctcctagacacagactgatagctgcaggggctcagagacagcagccagtgccaccttttcactgtgcagctcgggcagagggggaagtgagttgtgcaggtcacacagctgtgaccaatgccaggatcgctggccaaaagggcagcatctgttagcggccttctgcccccttgctcactctgttccatctctcctggtgctctgtccacacgctccgcctcacccctcggctcccccaggaggatgttccccagctacaaggtaaaagtcacaggcatgaaccccaagaccaagtatatcctgctgattgacattgtccctgccgatgaccatcgctacaagttctgtgacaacaaatggtaagtggaccctgaccgcatcacccacgttccctcaactgcccacttgccacgcccccacctagtgttttgtccgggggatttcttagctacctgagtgactgcccaggtctgcaggctggagtccactgcctggaactggctgtgcggaggctgaggtggtcagcgaatgtctgcatgcctgcttcaggtggggctgggtttgggctgaaaagcagctgcgtgtttgggagtttggtggatcgcaagggtctgtactctccttatggccgtgggtagtcaggacttggtaactatgctgtcaggtgacagacaaatcattaacactggccagatttagactgtcagtgcttcactgtggggaagatgggagcagttctcttggggactttaagggcaagccattacctgctgtgtgggggcactcgcctgtttctccatgttctccttggcttcaggcccctccagccatccagacgaagtgaggctccaccagggggttggtggatgggaccctttggcaaggggctgggagacatagagaggtaaagggacaaaaccaaaaggggccaggtaaataaacgctgggctacctttcatgaagccaactccttagtccctgactgcctgggagctcggaacagcgctccaggagcgagcagccagccaggacactgggctccgtggcaagtgagccacagagctggagagattgggccgagcaggcaggatttggtggccacgtcctggcaagggccatgtttctgtttcttctccctctctgggctagaactcagagcaggctctggctgcggggagagctaccaattaatttcttaccattgttttggggacaagccttttgagagttgtctaggtcctctgagaagctccctctaaataatataatttataacatgtgacaatcataatcataccaggtgtagcggctcatatctgtaatcccagctactctggaggcagaggcaggaggatgacttgaaggtcaggagtttgagaccagcctgggtaatatagtaagatccttgtctctgtaaaaaatgtaaaaagttaactgggcatggaggtgcatgcctgtagtcacagctacttgggaggctgaggcagaaggattgcttgagcccaggaattggaggctgcagggagctatgatcataccactagcatgggtgacagagtgagaacctgtctcttaaaaagaaaaaaaaattttaaatcataagtgtaaatatacatagaagtgcctaaatctcctcacaatatctttgtgattagccccagtccttcaattaaatgatcccatttccctgtaacctcccttttcttttctactgcagtaaaataaaggagattcagaactgctctctcctcctcagcattctctcctctgaacctcacactcctacccttgaagtactaatttgacaatgtggtgggaccagcagctattttttcctctggtcaatgggggtttgctccaagaggggacggggaatctggcctcaccagcccctggagtaatcacctgctcttatctgctctgttggcaggatggtggcagggaaggctgagccagccatgccaggaaggctgtatgtccacccggattctcctgccacaggagcccactggatgcggcagctggtctccttccagaagctgaagctgacaaacaaccacctggacccctttggccatgtaagcatgggggctgcctggccccaggaggcaagtctggggcagttttaggggtgggacaggccaggatggggatagggagaatccactccgggatccagctccaggctttggcgctcactgaccagtttagggaaggagctcaagcctctgaggcctgcagagagctggacttccttcccggccacttactggctgggtaactctggacaatcgtctcagcctttttgagcctcactttccttgtctagaaaatggagatgaccacatgtacctttcatggctgtgagacttaaatgagagggtttaccggaagcactttgcacgtaggaggggctaaataaatggcagctatgatgataaaggtgacgggtcagatctcagcttcagttccccaaaatcttgccttgctggaacataacacaagaggggtaagccttttcgagcgagagtcacggatatgttccaaagcccctctttggtgtgtaccgtctgcctggcctgacagccgcctgcttctgggagaaaagaccttgctctggctcacatgttagctcctgctggatttggcctggtccttacagaagagattctgaagccccagggatgctgctgacgccccatccaggcagcccaagctcattctttccccatctggccctggaaagtccacaaaaaagagatttttatgtggaaatttttagctcaagtgtgtggcaaacagaagtctggggacctggtactatctgccagggcacaggcccctcccctcgagactgcccgtggtttctggggaagtgcagggcaggggcagtggaggctttgagatgcaggtgtggctgttggggttacgagatgtgcaggtatgtcccgcttttacgtcccagctctgaagcatagttcctatggaaaactccagccatgcttcttttctgattgatgggtatgtaactggcattgagcttctagttttaatttctcagaatctattcagttcgcttctgagtcattggtgagctataaacaagcagctaggagaatgtttaattaatgcagtcaactcctgacttatcttatctggtttgtgagtccctttgctgggtttcccatacagggcaggcagattcccaatggggaggatcagccaagttcccacctccccgagccccaaggcatttcagctgagaggcagaggggcttcctgggtctccctgggcaccatcctggtcaagactttgttcccagtcaactcctacccaacttcctatgcttggccaggctgtggcaccagcctcaaagggtagggagggtctctgtgtggggaggctagggaacctggcccacgacggcacacacacacagaccccatggggggcgaatacagagcttgtggggagctgcatctttgggtggccatttgtccctagagatccaaacctggagaggattttggatgagccagcttgttgtcagggctgccagctgcagggatgtctcagaggacacctctgcttccctgacctctagaaagtgagagcagagggagttaagggctggaaagctgcgccttctttaggaagtgggagagagcgctctggccttcacagcccagcagtagcttttcacagcctggctaacctcttcagtagctctccctgggtctgtgagtggtttgtgataaactgcatagaagtcagggccagtgaggctgcttgatgggcttgtgatgctgggggtgcccctggctgcatctgccgtgcctgcctggcgcttcccttgccttgatgatagggatactacccacaggaactcagctttttccctggatgagtgggacgcagagcatcttccttctcccttcatccccacacttacccagtacttgcagtttattggctacaacagccctgtgggtgtggcagggcccaggtaccgtctcagacccaggccttctgcttccaggtccagtgtctctgggcttctccactgcctttctgtacccagggctctcgctgcggtatcttcacctatttagagaacccttgaagagggagcagcctctggccattcagacaagggctgtggagagacatatcagggcacagcaacccatttggacattgattttcttctgcctcttggcccgtgcccgtgggagtggtgagctcccattgaaggatgaaggagtcacccttcttggcttctcagtgcaagaggctggggaaaagccacgttgtattgggaattgcccttccttctgcacaaccacttctacgttttcagcttgccctgaaagcttccaggcctcaagggactttctccagccacatgggcttggacttttcttggggatcctcacggtatcccaggagcttgagcagctgcctcctattggcagccctcacccccaactcctgcccaaaagggtgggctctctcctcgcgaaagggcaagttgagagctcatgagagtggctgtggtatcatcttggggtccaacaggtggactcagtgtccttctagcctggagatccctgggcccaagccatcccatttcctcatcccaggagatgagcagggtggctcatgtgtctgcttgctggtgccttaaggcttcaaagagcaggaagccctgactgtcggggagggggtgtggaacaactattttgggataatccgggttttcctatcattcaagattcctttcttccatgaatgctgctcttctctgaagtctgaggaccttagattgaagtcttgggcctggtagcctgtcctgtatggcacatggggccctggaacaggaacctctcagaccacatggccagaacctcctaaaaggactgagctcccactagaacaacactccttgtgggtttttgctgtgggattaggaaagccttcacagcagaaatccacaaggaattttccagtctgaaccttggaaggcaggttcaggagggcagattcagacctgggcgtcagctccagtcccgaggttgggccaggcgggagcagaaaggaccaaggggctggggctggatgagctgcctccaggtggcctgaattcagctttgcttctgctgttctgctggccacagaagctgcctgcccactgtccctcctgcctgccactacctcccacgcccagcagggtcctgtgcccggcgactatgagatgggaaaggaaactgcttccctcggctttcttcctcttctcctcttctgaataagcttctagcaatacctgggcttcaggaagtcagggagggcctcactggggcataggcgggacctgtatcctgtagcacgatgaggaaatggtggcatgcaggtatcccagattgctgaggagggagggccagtttatgatttctgacgcagtgagtccaactgttggaggggctgcattagcccctgggctagaggtgtgggctgcagttcctcagtcacaaagtagcacgcattagtccccttaatatgcgacttccttctagccactgggcttcataactggcataggcctgactgccacacccttaggcctgggactattttcccaccttcttcacctaggtagctactcctgagctgcgagatccaagctcaaatgcaccttcttcagagagaaaggttggggtcctcattccatgctgtcagagcactatgcaccttttcatgctagtacttgccaaggttataattttatacctatttgcatcttaacattttatttatgaataggaaatactttcacaagctttaaacataaatcattgaacaaattaaaatgtctacaatacgacatctctctctacttgttcctgatccactgtttctttcaacccccagtacaggcaaccatggctaccaatttcttttcagcattttttttttttttttgcacataggcagaatgtgtaatctggaatcccctcttttacacacaaaaggtagcatactatagaaacattttttgcatttgctctgtaaacttaataatatctcttggagaatagtctattcagagagggcttcctcatcccttttgcagctgcacagaattattattattttaatttctttgagatagagtttcgctcttgttgcccaggctggagtgcaatggtgtgatcttggctgactgcagcctccacctcccgggttcaatcaattctcctgcctcagcctcctgaatagctgggattacaggtgcctgccactatgcccagctaatttttttttttttttttttttttttttttttagtagagacagggtttcaccatgttgatcagactagtctcaaactctgacctcaggtgatccacctgcctcggcctcccaaagtgctgggattgcaggcgtgtgccaccgcgcccggcctgcagctgcatagaattttatcaaaatgattgtttcagaaatcatgtagccagttcttgttgaaggaattagatgtttttttattctttgctcttctgattaagcttgtacatatgccattttatgctgtgccaagtatatctgtgagataaatggcctgttcaaagggtacgtggatttgtaactttgaaaatatcaccaaattcccctccatgggagctgtactgatgtatatatttccaccactgctgtggccttaccaataagggcgggagagcaaacttgtggatttttgtcagtttgacaggtgaaatgtggatatcagtgttagctttaatttgcatttcctttattatgagtaaggttaagcatcttcttttaataaatttcctctcctgcgaactgctgttctcatcctttgctcatttttcttgtaggtttttgatatcaatttctaggaactcttataaattaggaggatgtagctcttatctgtgatgagttacacatgtccaggttatcatttgtcatttggttttgcctgtagtgatattcccacaccgatgcttttgattgaattgaccagtcttttccttatagattttggattttgagttattgaaagccctaacccccctccttacttataagggacttttcttttagtattttatggatttatttttacatttaaaccattgatccttttgaaatttatcctggcattgatttgaggtgtgaatccaattttttttttttttctacagagctatccagttgtcccagcatcactaattgagttgtcccctttcctcccctggttgaggtgccttatttctgaacactaaatccctatatgaatgtgtgcctgttcacacgccagtcttttaactgttgagactggataataggttttagtgtttggcaggactgggcctccttgatcttcttcagagttttcttggctagtcttgtctattttttcacataaattttagaataagcttgtagtgttaaaaaaggagcttatttgtatttttattggattttccttaaattataaatttacttagagaagactgataggaaggcttttctatttgctgagggttttctggttcttcaaaacgtattcaggtttccttgaaatggccctgcacgtttcttgttaggtgtgtcacctgatttgttaccatgataaatgcagcctttctttcactacattttctcaccacttatttctgctcattttcggagttactatgtgactgccccaccagatagtaaaccatgaggtttccaatcactgtgacatcctagtgcctagccaccgtgtctggcaagccagcgggtgctggtggatggtaagtgcatgagaaactcctgaagggggtggtaatcagacagcaaagccacttcccctgccaggggcagatgtccccccaaagcttatgctgctaatctgccagtggggacccagagctatttatctccctctttcctcctttcctcccacatttgctgatccctgacaatgtggcaagccctgaactccagatcaggtcccaccctccccagccaggttaaggtatgaactcaggcttggaaactagtaccaattctggctgtgcctgaaatcggctgtctgatgctgggcaaatgcctgcacctccctgaccctcagtcccttgcctgttaaaataagggcaataataattaatgcctactttatacggatactgtaaagattaattttatggtgaatgtaaatggcttagcacagggcctggcacataagctatgctcagtaagtgccagctgttactgctgttgctgtggcagaaggcaggaaggtttggaggccccacggtaccaccccagtgttgctcgcatgggagtgatgcctaaggttccctgggcaaggcctcttgagtgggctgatgggctccctgacttagatctagtttgaattttccttggatgcacctcttatcatccggggtctcagttttctttctttccttctttggtgtttaagctgagatcctgtcactgtcctaacctctttgtagggctggggaggatcagaaggatgatggagaaggtagtcacagaaaataaaattatgatgcagggtaaatctggttttagtatctgacaaaatggacattagccacacttttgaggggctagcatccagataacatgtgttctgtgttctgtagggcctgctgacccaagtcccttacagtgtttaattggcaccttctcattaactctgagcttgttgagagcagtgtgtgctctctcacaggccatctggatcctgctccagactgtgtctccaaccagctgtgtgttcctgggcgagtcacgtctccactaccagcattctgttcctcatctgtaaaattagagagctggacacgaatgatctcaatggcctgcctctccatgccctaatgttctgtgattccaatgtagatagatctgggctttattggccaagcacgctatggcgatctcttgaggagagggatgtttggcgcaattgcagttgttaaaatagaacaggcttctgaattgtggccagaacataatgaatcccatttctgtgaaacgatgatgacggaaccagtcatgtagtggggttgttgacgtggctggcccatttggccccatatcctctgcagcaaatataaatgtgaaactctggcaaagtagtttaatgtggcgcctgaggaacttccgagcaaagccaggtgtgtgagtcactgagttggtttcacattctcccggctgatgggactaaggctcaagtttatacttgtcttggctcaatgggtgggactttcttccagatacctgtccaggttctagactgtcggagtcagaaggggtgtttgggaccacttagtcaaaggccccacttcatagatggggaccccaatggttggagaaggagaagagcttgctcaggacttgacgctggtgaacagagatcatgacggcgtctgcacccttcttgacttctctatgaccggggttaccctcacctagtggctcccacctgcccctgtaggactggcagcttccctctttgcaggtttccctgtgagcctggctggttccctgcctcggaagatgtgttgggcactctctccaccctagtcatcagggactttgtctgacgggctaaggagtttggcctttattccaagggtcaagagggaacaatcaaaggtggattgtgtacataaggcatttactgagccccatatactggcagcagtggtaggaggggatgtgggggaaagaggaggaaatacaaaaggccctgctcttaagcaatgcacatcttcctgaatttcccagaaggttctgagcaggggagtgaactgatgggatgtgtttcaggaggaaatggagagaaagtagatggaggtagggggaggctgtcctagcagcccagccaaagatggtggggcctgaagcaggggtgtgcaaaaggaatggaggggcttttgttttatagatagagtcacaggaatcggtcactgagtggacctggaggtggatgacagtgaggaggaggggagttgatgatgatacccagggctttgacgagcccacgactgcttgtgactgcccaggtgtcacaggagcagggtggctgctgccatgtgtcctagtgtcctgcacagccttcatgaggtgctggtgcctatggctctgtcctgggttctctcagcccacggtctttgttctccctttgcgctgccacctttggagagctagagtgactgggggaggccttcatgccaaggagctggcacatcggggaactcatgggagatcatctctgcacatgtttcatcaccacttttgacctaggaaatgccttagagatgatctcgtctttagtgagcaagcaaagaccagagaggaggggacttgcccacgttcccacggagggtttgtggtcgtggcccagatcttcccactctcaaacccgaccttgcactcactagatcctgtctgggggcaaaggagcctggaggtacaaaaggataaaaggtatagccctttctcctgaggagtttagagtttaattgaagggacaagaagaaataggaagccactaggatgcagaatgacaaccaggtagataacacatgagaagtaagtttcagaactgggcgttcagagcaggcccttgtacctgagacttcctggaagatctgggtcttcctagaagagatgttaggcccagaaggtgagaaaagaatgggaaaggaagatcgagacagcagagggacctgcatgtgcaaaggtgcacaggtaggaactgggcattcctggagctatcgggccacctcccaggtattccattgctggatcttccgggaacgtgggtcctttgtggatgcctgcagctctgtgaatagtgcacggtgatggagtcacctaaaggggctgggaggtgttttccaggcccagttcctctcgccacaggagcatccccagcgtcctggaaagggacagacatcgaggcctctctgagcgggacctgtgtcctgtagcctcactctgcattcctcacctggcaggcccccagtcgggcagcaggtccccagctgcaggacctggtttggggtttgggagttatgtacttgcctcgtgaaggtctggaggtttgtcactgagggctgaggcgggagtggccagtgcagaaggcagaaagtgtggttcctgctggatggagtcacccagctcaaccgaggagcccagggaaggccagtacccacagcccaggtcctggcccacccattcctcagctgagctggctctctaggctatccctgtgccccagggcacgataagagcagagtcttcccagactaagactttggccaaggtttgccataaaagagcctgactctggcctttctcttggcactctggtcactaacaggttaaacctttcattcagcgtcagtaccaggtcccatccctgggaacctagaagggtggcagcccaacgaccaacccaaggaaagggcactgccagctacggagaggggagctcagaggggaaggggacccgagggcccgcctggcctggccaggacagaaaccgaagggttaacagaagccgcagggctgataaaatgccccaaattcctggtcctgccttcaatggggagggcgtctggcaaatgtcaacgataaaaaatacattttaatggcacatgatgcagctgctaccgtggggcgcagccaaatgaagcaggtttggagcagcaactactgtgagcggcccccgggggctctggcagccgcgcctccagggcgctttgctaagctttgtccagccgcggcaacccgcctcccccagcccacggcatcctcaagggcccttgggatcgggggcctcttgccttctatggcactattttggaaactgtgccgtctcctaccttggcaccttgaacgcttgaagagcttctctgagggctgggagcggccttaggcaggtctgaaggcaggatacatttgggtctccccagcacaccgtcagcaggcctctgtgaacgttgagaaatgcataaacaaggctaggtgcggaggctcacgcctgtaatcccagcactttgggaggccaaggtgggcggatcactggaggtcaggagttcgagaccagcctgaccaacatggtgaaaccctgtctcttctaaaaatataaaaattagctgggaatgatggagcacacctgtaatttcagctacttgggaggctgaggtacgagaatcgcttgaacccaggaagtagaggttgcagtgagccaagattgcggcactgcagtccagcctgggcaacaagagtgagattccatctcaaaaaaaaaaaaaaaaaagaaaaagaaaaagaaagaaagaaaggaaagaaaagaaatgcatgaacaaatgagcaatgtgacaaaaaaagttacagtgggacattttcctcagctttttccctctctctcatcctgcaaaacccaagtatttctagaagaggcaggtcatgtgtaagaagggtattgagaagaggtgaggctggagggggacccctgagggagggaggttacatgttatgatcccatttacaaatgtggaaactgaggcacagagaagcccagtgacttgtctgagatcaaacagtgactcggtggcaccctggacttttgctgacagctcacaattccacctgctacactgtgctgagttcacagtgggctttgacagtgttaagggctgactcaagttctccattaccacagtgaatcaactggtcacatcaaggagggcctggagctgggcattagtgctggtgcagagaggctaagtagggctggggtggggagagtttggggcccaggggcctggttcttcacttgggagctccagtcctggtcggtaggccccggatcctgggctttgaggagaatgagaaaaaccaggccagggccagaagaatgaggtcaagggcctggggcttgcggatggggacctggagctcagcatgagacccttctcttccagatcatcctcaactctatgcacaagtaccagccgcggctccacatcgttaaggctgatgagaacaatgctttcggctccaaaaacactgctttctgcacccacgtgttcccagagacctccttcatctctgtgacctcctaccagaatcacaaggtacagccactgccccactgccccacagccccacttaacaccaccctgcgttctcttccaccaggcagagaggcagagtgtgaagccagagtcccagcagggcttgggcaggcccagtgcagggacctcagaagcctagagtccctcggagccgcgagcaaatcgaatgatgaacagaaaaggaccctagatatgtccatctccagcacagaggaattacggtctctgtgttttggggaatggagaaaattggcaactgtaaaaaccaggagcttggagtctgccttgtggtttgagcattgggccctttcattccacaatgttctttctcctggttcatctcctggtgccttcagagacaggggtagggaatggggataggagccctggggtgctgtcagctggggtgtggaagcagagcctgagcggaggcccttcccaggctgtgataggaggtgccccagccacctcccacactcactactgccctccccagcccggccacccccactgcatcccagtcactgacagccgtgctctgccgcccgtctgctttccacagtatgcacacagggactggcaaggtgggcaggggtcactggggaagggccgtggctgtggtggattttaggcagaagagtgacagagtcggaactgcatctagaacggtcactcagagcctgatgtagttgcacagactcaggcagcaggcccgggatgctcactgggaagatgttacaggtccccaggagagacccatggggacagaagcccggcagtgcggagggctggggagcaggagaaagaatcagagggtggagagcaaggagtagggagccagggacaaaccaggtgtgaatggcaaggcccacttccccagacctgccccagttctgcctgtgcctggggttggggaggagggaaggccagaggccagtccagtcccaccctcctccccaaggagggtagtgagaagcggtgaggctggagagcgacccctgagggagggaggttacatgttatgatcccatttacaaatgtggaaactgagacacatttgtgtgcctcacactggtgaccctatgtgttttctccccacagatcacccagctgaaaattgagaacaacccttttgccaagggattccggggcagtgatgacagtgacctgcgtgtggcccgactgcagaggtggggctgcgtagcctgggggtggggcgggcagatgggattcaggcacgtggcctctgtgaccctcgatgtatcttcactctcttcctgtctctcctcctgtcctccccaccccttcagcaaagaataccccgtgatttccaaaagcatcatgaggcagaggctcatctccccccagctctcagccacaccggacgtgggccccctgctcggcacccaccaggcactccagcactaccagcacgagaacggggcacactcacagctcgcggagccgcaggacctgcccctcagcacctttcccacccagagggactcaagcctcttctatcactgcctgaaaagacgaggtagggctctcctggtctagaagccctagagggtaagaggagcggtgaggttctccccgaaaccactctgcagcgcccccccccccaacacacacacactcatctcgtgcttgtgtggcctgggagagtgggcctgaagggttagggatcacagctgggcgcagggccatcttttccagtgcagggatgctggttctcatctctcatgctgcctttggaaccctcacagacagcttgtagccccggtgtccccagacacctttccaagtgttgctttgcagtcactgctctgagagcctcgtggggtgagctgggctctgcctggaagtgcaggaagaggctgacacttcccagtccagaggttttgggattggggctgttgtttgtcaaagcaacctcaattccagaacagggaggacttggtgtctcacgtgcagggccttccacccaatcattccttccaggatctgcagaggctgcttgagagttgagatgagctattgtggatgtaggtgggggctgggaagacaagccacagcaccctctgtgccaggcctcttcgtaaagaggaggagcccggagctgggcaccatcacatctgtgctctgtgccaggtcttgattcctccatggatagaattgcaatgattcgtgttactccaccagaagacctcatggggctgctgaaattcccttcggaatgagcctggggacttttgcttgccttccggaatgttccctcagccctggtcctagggactagcccagcagagctccgagatcccctgtacaagtctcattagaactcaatgacctagagcacgggttggcaaactgtggccttcggacctaacccagcctgctacctgtacaaaatagtttttacatttcaaaacaattgaaaaaaatcaaaagaatatttcatgagatgtgagcattatgtgaaattaaagttttagtgtccataaagttttattggaacacagccatacccatttacttacaggttgtctacggctgctttcatggtacaacggcagagtttcgtagttgcaacagataccctgcggcccacaaagcctaagatatttactatctggtcctttgcagaaaaagtttgcccagtcttgacctagagtgagtaggccacctgccaggatcaagagcttagctcagggagaagagagggatttggagagaagacggagaatcgggctgagtgaggggcaaaggagagagctgggcaagggagaggagcaggtctccctgggcagggcagatgccaccagcaggggcagaggagagaggtgagcagaggccttcacacccatttagcccctctgcttccagccccgtgggtgcacacacagagctccccgaatgaatccctggagaaaacaggaggagggaggccaagatgagccatggatgtgtggggtttttgttgttgttgttgtccttgttttgagacggagtctctctctgtctcccaggctggagtgcaatggtgcaatctgggctcactgcaacctctgcctcccgaattcaagtgattctcctgcctcagcctccccagtagctgagattacaggtgtatgccaccatgcccagctaatatttgtatttttagtagagatggggtttcaccatgttgatcaagctggtctcgaactcctgacctcaagtgatccgcccacgttggcctcccaaagtgctgggattacaggtgtgagccactgcacccagcccggatgagtgttcttaaattggctcagtgggctgctccccaaaccctcaggcctgggtcagccctggatcccaggggaggtcatgccactccagatacttaggccctccttgtggaggatgtcgaaaggcacacatacatgatttgtggcatctgatgtcatctttccccagagtatctgcttagcctgaaaagtatgtcacctttttcacttattatcagttctatttcttaatttggtagacactgtggtgttggaatctgtgtagtaaaaatctgatggttcttctttaaacacatgtgaggttagttcatcttctaaaagcaacagaaacatgcctacaagtggctttggctccctgaggtcttcctgggagctgaggatggaggcagaaacctcatggccttaattttctggctacttcagacagatgtggcctctgggcatgggctggcctggcaagtgcctctactttccttggccagggagggcctagcctgagaatgccactgcacatcagggcctctcactctgcaagagtcaggctggcgaaggatcaaagccgagtgctgcctggctaagcctggccctcagtgtccggtgatgtggtgtcccccgtggcctctgagtagggtccgtaatctgaccacttcttggtgcctgcaaccctataaaagccgtggctgattgaaatggctctgggagtgccatggcaacatggggagggcgggcgcagagggacaaggacaggctgtcccagcatccaacagggtgctctggggcctgggctggtggaaatggttcttcctgaatgttactttgtctttcagcagacggtacccgccacctggacttaccttgcaagcgatcctatctggaagccccctcttcggtgggggaggatcactatttccgttccccccctccctacgaccagcaaatgctgagcccctcctactgcagtgaggtgacccccagagaagcatgtatgtactcaggttcagggcccgagattgccggggtgtctggggtggacgacctgcccccacctccgctgagctgtaacatgtggacttcagtgtcgccgtacaccagctatagcgtgcagacgatggagactgtgccgtaccagcccttccccacgcacttcaccgccaccaccatgatgccgcggctgcccaccctctccgctcagagctcccagccaccaggaaatgcccactttagtgtctacaatcagctctcccagtctcaggtccgagagcgggggcccagcgcctcattcccaagagagcgcggcctcccccaagggtgtgagaggaagccaccctcgccacatctaaatgctgccaatgagtttctctactctcaaaccttctccttgtcccgagaatcttccttacagtaccattcaggaatggggactgtggagaactggactgacggatgactctcacgtctcctccatagccccgggaccgtgttgctccagtattaacctctgtgggtggcctgcactctaccaagaaacacaggaaggtattccagtgtgtgtgtgtgtgtgtgtgtgtgtgtgtgtgtgtgtgtatacacgagcatgtatgtatttggagagcatccatcttctgacatacaactgaggtcatgacaaggaaaaaaaacaccacatttatctaagaagtgattttggctgcaggacctgggtctattgttatctgacatctcttgacatgcccgtgggtgggatgggagtggagggttcatatgagttattgagagggttttataatggttgatttactcaggggccaggtggggagttctctcccatggggaaagattctcactgctggggtgggaagattctcgctgctggggtgtgaggactctgtgcacaccttagagttcctggccttctctttgcaaggggagctgagaatctggttttggtagcaggaggcccactcctttgacttctggagagtctgtgagactgcctgagaggtgggctcagctaagccacaatgtgtactttgatagtacagctggctgctcagtgagtggcctagacattgatgactggagctctgaggtctgagggatgacgttcggaaagggtcatgggctaaatgtcacctgaggggtatttttaaagggtttttttttcccttcaagaggagggaaaatgcaaccagtagcatctctgtcatcattcagattttgtaataaagtacagagcccttccccctaggtccccaacatacagtctctcactctggtgtgtggagagtcagcctcccaggcaccataccatctgcatcctatgatgatgggcaattatgaaacacgcctcagctggcatcatccccaggaggccacactggagctgatgtctggcatctccagggcctgttctgctctcagaaaatctacgcttctggagcgagaaaggccaacagaaataaagatagttgaaaaaaatttgtttcttccagtaaattcagccggtgagctcagaggagcaaagagaattctccagtgtggcgctcacaaagtcctcagccctgcgttttagcattgaataccaccaggccatcagtgtggctggggtgaactctccatcaaacttgggaaatcactaaactctttgcatgctgaatagctatttatatattatataaataaataaatatatatattatatatcgctctctctcacaaatgcaggccacatgtcaaattcagctttgctttctacaaatgaatgaacttaataaaaataaacgttggagggggtatttggaaagacatctatttaaatttttattacatgtttgatattaaaaactaagaatggtttagataaaacatataaataaatatatatatatatatatatatatataaacacacacacactacagataaggcttttttagaaaacacattagctaacaggtgatatggaacttcaagtgttttgttatatagcatggatgttttattttgcatatcggaacataaagccattttacaactgtgaagtgtgtggatgctctttattactgacttgtcatttcttggctctgcaacggcctctgcctcttttttgctggtattctttttctcaagtgtcaggtaaggccctcagtacctctgaacatgtgtaccgtggagcctctgagctcacagtgaagtcacctaggaccacagagcaattgcacctttgatctcatgctactccctgggttatgaatctggactccagggtccacaaagaccccagaagggcgggcaggcagtaaagcaggaatctgtctcctttcagcagtcaacacataagctggccatttgggggaagtggtctcgtaagtagggaattcctggtgggatttatgcagctgcttcagaaaaggaactgaagagcaggtttgagtcagtgcggggggcttcctggagcagtcaggggcatgagctcatcaccaccatcaccccagaatgggtgagtcaaggcctggcaaagtccccattcgcctgcacctttgccaggtccctaaagcttggccacaagatggagagaggaaaagcaaggtgaaatccagcccaggttcaccctagattggaagaggcaggcataggaaggcgctgctgggtctccctccttacagccttgccacctgccctgcccctcattgctccttccccaaagctgcttacccgcatccaccatctccactgcaggctggtctaggaacccaggaaaagagaaggcaagggaggcatgcccttgaatccttgccctgtcaggactgagatgagacttcctgctgggtaaagactcaaccttgtctcctgtttctccagagtccttttgtggctctaggctgctctctggctggacttcttcctgcagaacaggaagccaagctccatcctcccttagctgctggcgcacaccttgggattcttggtcatggagaaagatgttaactgagcttggctcaggggacagggaagtgagagggctcttcctaactcccacctgctgcgctcttttctttctgggtgaagacagcacatctgggacactccacaccttctagagcccaggcagagggctgggggcaacgcggatgttcccaggttctctccaaacacatggttggctgagtctgacatgaagaaagccacttcttaaaggggtattttgcctcgaggcagcccacggcttcctgccagcttcctgggaagcgtgaggtccctgggcttccccacctgggcatggccagagccgggcctgcagtgggatttgtggaactttcctgcgcctctgaatcaacagctcaataaaaagggggcacatgggatatcctgaaacaaagggcaccattcaggagcgccaacaggtcatacatcatcggccagaaacctgccacatgaaaagggtctgcttctgctgtgccctgcctgggaaggggacaaaagccaattaacgttcagctgcatgtccacgggaaggcagccttgggggctgtgctctccagcccagggccaggcccctggggagaagccagggcaggcctctcagcagcaactcagccacagacagttggccctcaaccgtagaagagcctggaataacaaaagggagaagggaaagagaagctgggtcagactgacaaattgttaaaaaaccaaaccaacttccagccttggctgggcctcagggggtcaagaggcctcggctcgccccactaatggagcctgctggaggagtagcagcccagcctcgcagtgtcttatcttacaacataaaattaaaacccacttaaaaggccggagggcatgttaacattccccctgctgtctaattgaagtagttcccagcgcaaaggatttcacttgaaagatgtctctgtcccagcccgggtctccagctcagccagcaggggaaaggggttggcggggtcgggggagagggggcagaggctgtttgcttgccacccccacccaggcggcaggtggcgacagcaaaggttagaacagtctgggttgttttgtattttttaaaaatttacaaattcattagcagctatgtcagcagaggccacactcctgacaagaagacctggtaatgattcaaacgtggtgagtcctgcagtgaaacctggctgttcctgcagccaagagatttccatgccatcccccggcaagccctctctccccccacgcaaatctatgacaggtctccaaggcatacggaaccaatcagggacatcctgtcaaggtgatgaacttgcactggccatcccgagtaatgggaaccagtcagcctgaagccggcctggactgaaagccaaggtgacagctattaagcaattgtgcgccgaacaaaatggcaaagcggccgggtaatcaattcaatttcgatgggcaacccgagcaaccgcagcggctgtcgcagctgattagggaggaccgggctggagctttcaatgcgagcccatcacagatcagaaacaggcccgggatgaaaagggaaagaaccgtctcctgagaagcaggcgatgaaggactctgttttatgtgactgtgttcttcctcctctccttgaagaaagaggagaaaaaaaaagcaagcagtttggagattagatagttttcttttcagccatttatcattatgaaggaaagtagacagcgcaggggcggaagaatctccagtgggatttctgcgaagtctcactcggaagggccaggtttacatgatgcagctcaaacagccctgcttatcacagcagcctgacggggtctgcagagcatcgagggttcctcttctgtaacaagggcgaacaggccccagtgcccccaggagtacagaaattctcctgcggaaaccccaaaccagcagactgcatcatttgtgaaagttaaagcctgagtcagaataatggggagaggaggaaaaacgggaaaggaaaagacgaggggattgtgcacggtccctgcaggggaggcccccgtggtggccccccgtttctccctggcccaggttggcgcagcaggggtgcctgctgtgtctgctggcctgtcagcactgatcccagtctgatggcaggccctggcagcctgcttgaacattctaggcttgtgtttggttgttctgtgccagggttttggggtgcagagcaaggggcacccacaggcacagaagccgagagagagaggccagccatggggatgtggaggggatggaagaggcttgagaacagatggcaagggacgcagaaccaggaggaaaagggccattttgaagtcaagggtgggtccaaacctctggggcaggagggctcagggctgggactgggccggtggtgagggaggaaggctgaccacctcctctttggaaaactagagcaatgggtgcatattcagataattcttagaagaatcacaaatggagaattaacctcactagtcatctaaaatgcaaattgaagtgataacatgccactttcatctaccagattagtgaacatttaagaaaaggggttgggagcctctctcagccattgctagtgggagtacagattgacatggtttttctggaacgagcaatttggtagcatggacaaagactctaaaagtgttcattccctaaagaaaataaccaggaatgcggacatagtttaatactgtatgatattcattgtgattttactttttaatagccccaaactggctgaaagtaaattggtaaattatgagatacattctggaatatgatgctgtcattgaaatcatgtttacaaagggcccttaatgatatgagacttgatttaaaactaagtgaaaaaaaaggatcctaatatagagtacaatttcaagaacatttgaagtgaaaacaaaaagattggtgtgtagccaaactatagatcattacatagcagttaacaaggggatgaactatatctgtatatacatgaaatactatgtgaaaaaaagttcctgacatatggtctcccatgtgtatgcaatacaaaacaaaaaaacactccggaggtcccaacatcgattaagcagaaatgtccaggagatggggtgcatttatgtgtatatgatgtatgcatgtatgatgtatgtgtatgacgtgtatttgtgtgtgtgtgttagggacacagacatgatttagaagaaactgcttatgatgattccctcatatatctctgtttcgtttaacttattacaatgggcacgtattatttctgcaattaaaagatttaattaaattaaaaaaaaacttgtgattgtagaagtacccaaagaaaagaaaaagaagaaaggctaaaagaaactgtgcccagtgctaacggcagtaacgtcaggaagtgctggatctgctgaatcgctgcccgggtggacaaaggttgacttctgggcctcctccccgtgtttgttttcctcccctccctggctgtccgcctcagacaccctgctcctgcccaggcctgcaatgctgctgttgttcaggctggggctttagcattttccactcctccctaggtcctctccctgggtgacggcatctgttcccacggcttctctcaccaacatatgccaacgaacctcaagtccgatctcatttcggtctcctgataccatcttctggacatctctgccagaaagagatgttaagtcctccaattcagactggaacccagactctccctccaggcctccctcacatcctccgttttggtaatggcaccaccagccagcatccagttgctcaagtcagaagcctgggcttcagcgccaactccctcctctccctacctgcccaccccaaatgctcaccaaactgcagattctacctcctaaagattttctacatctctacacgtttcctctcttccagcaggcctggcagtgtttgctataacggcaaattcctgggtctgggcaggccaagatgtcagctgtgtaaggctatggagcttggggctgctgtgaacggtcctcctgggccctaagctgtcattcacggagtgatggttttctgacatgtggagccaggaaactgcccaagcagcagatgcgaggccactcaatgagaagactgctgccttcattggcgaccttgctttcagctctgcgtggcctgaatcttgtactctggctgccaccttgcgcgtggtgaggaagcagggcactgctacaggccatcccccagggtcacaggctgctggagaggcctgttgcttcctaggggcaggtgggcctgggagtactggatcagggttttccagcatctgacccccaagccctgacgcctctttctccttcaaaggttccaaatggtctcttccttcaaacccttccatgggaggccactcagtctatgccaagatgggactggccttccctctctctcaagaagggaaaaaagcctgaaacaaaccaaactaaggccaagaagcccccaaatatggctccttgtgtaaagcctctagcacagggcctggcacagggcacgcttttgggaaacaacagtgcccctgcatccttcatcccttcacagcctgacctctctccctctctccaagcctagcaggtacctgcacgggccatcagacagcagaggaggagccactcgtcagcctgcctgaagataagctattgagcaagacaagtgtctcagcatgtgctaatataaacctccggcatcgggtgtaaggaattgtgagactcctccagatataactgagtgaatcatctgtggcatttagagagcactgctctaatgggaaggtggaaagtgtactcctattttatgactgagcacattgaggctcctctgagacccttcccagatgtcatgctttcctcttttagaaacaccctcaacaggagaaatgctcatcccagcaagagccaccagagaccccctggttctgagaatgtaaggcagctttgtgtgcctcctccttttccaggccaggcaggacagtcccaagtagggctctttggaattgggagctgatcgaaaacggggaggccaatggccagagggtctttggaggcttggttggtgagttctgtagaggatcctccagcatcaggtttgacaaagtctgagccaggttttatttatttatttatttatttatttatttatttatttatttatgtttaaacaagttctcgctcagccacccacactggagtgcagtggcaccatcttggcccactgcaacctccacctcccaggttcagatgattctcattcttgtgccttagcctcctgagtagctggggttacaggcatgctccaccacccccagctagtttttgtatttttagtagagacggggtttcaccatgttggccaggctggtcttgaactcctgacctcaggtgatacgcccgcctcggcctcccaaagtgctagtattataggtgtgagccactgcgcccgtgggccagttatcctttacgcctcctggctacctgcagccttaagagttgatgacttggccgggcgcaagatgacttctaccaaggcgggcggatcacctgaggtgagtagttcaagaccagtctggccaacatggtgaaaccccatctctgctaaaatacaaaaattatctgggcatggtggcgggtgtctgtaatcccagctacttgggaggctgaggcaggagaatcacttgaatccagtagacggtggttgcagtgagccacaattaggccactgcactccagcctgggtggctgaatgagactccatctcataaaaaaataaaagagttgatgacttaagacctaccttgctgctgcttcttttctagccttctaccaagaataggtgctgaattttccactctgatctccccttttcccctcaggggtaaatgctatctcactgaagtagatgtctcagcatccgtgagttagtggcaccaactctgcctcttaagccagaaatcctgggttcgatacttggctctgtcactttctggtttgtgcctgtaagtatagccattccttctgtgcctgtcaatgcaatggagataatattggaaataacatctgcttcttgtgatcatggagattaaaataacatatgtgagagggcttggcacattctctgtccctgatgttccgatactaaacaggaactcaacaaatgctggttcccaccctccttccttcccctcttatggaagggcattgctttagatttcagattcagaaaaggagggttgaatctgaactgagttttaggtttcccatctataaaatgagaaaagaaaaagacatttacactgagtttgttagtaatcagccatcagccattggacttggcactctactatattaggattattatatctaatcctccccacaacttggtaggagaggcattatcaccactgcctcacagaggaggaaactgaggctcaaggaggtgaagaaacttgctcgaggttatgggctaagggtcagaactggcttcaaacccaagtctctccaacccaaagctttcgcttttttctctaagatgccactactgctgccattatcaccactaccactgcgtgttctgtgctggtcttgccttcttcccttgtcctctgaggccactggacccaatcgatgtgtatttttagtgactttgagtttattaacaaaaaggaaacaaacatgttgtaaaataagtttatgacttgaagcatgcaaaatggcagagggttacccttttagaggatgataatttatagtcacctccaccaactccaaccacccatccccactggaccatgaacttgggttgtcttttgccctccacttcacagagaaggggctgatcaaaggaggggctgtcattgcactagctctcgccctccccctgtgggtgagtcagctctgcccaagctggtagagtcaggaaatagttcaggtacctcgaaaacaactgtttaaagtgtctgggggaaaataaagtgttttggggatgtccccaagccccacttggcttggatagcaaagctagggtgtcctttccttgcctttccaactcttggtcaaaatatgcttccttgggatgacttagaagagacttgtttgggaatcacttttctttaacttccagaattcctaactagggtgcctgaagcaagagctgggtctgggaaatgacgcagctccatgaggaatgatggaaactatgcgagctgcttttaatagcatcaaatatggcacagcacagtcctccttctccctagcccccacgtgctggtagcctggcccacatgctctgtggcccagactgaaaagccagtggttgtctcttcagggcggctgtggacctgaatgtatgcgggacacaacgtaggaggttcaggcattaatctccagtctgtcccatgaaagacccaaatgtaattttctggcccaagaaaatgaacctttggcttctttttctatcagtgtagaggagagcacggagcttgggactcagcatgagaagatgtggtcctagtcgcatctgtcacatgctggccgtgtctcccctctctctgagcctccttttcttccgcacagctcctcacaacgcttgcagcgctaaaggatgatgattcccaaatcatgtttgcaatcacgaatttctcagccatggcagggctctgtctcaatctatagcagacctctctggagcaaagttagggacggaggaggtagaacttctttctctatttatcttacattttaaacttattctaatacttttcaaatatcgaatgtctatatttgtatagtagtacatatgtataatttgtaaatcaatttgtaaataagatattggtagcttgtgctttaaggtttctttgtttgtttgagatggagtcttgctctgttgcccaggctggagtgcagtggcaccatctcggctcactgcaacctctgcctcccaggttccagcgagtctcatgccttagcctcctgggtagctgggactacagatgcacaccaccacgcccagcgaatttttaaatttttagtagagatggggtttcaccatgttggccaggctggtctggaactcctggcctcacatgatccacctgcctcggcctcccaaagtcctgggattacaggtgtgagctacttcgtccagccttaaggctttttgctgaagggaggtgagatttaaaaatgtatggagaccacagggggatggggaagtcaacatgaggctctgctcacaggctgggacctctgccattcctgtcatgccctgggctctccaccgtcctcccagaggtggatcaccagagctctgggtggagaggccaggcccaggagtggaaagagaagaggcctggagcttcactcctcattagatgcctgcctaatctctgtgagcctgtctctccacgttaattaggggcaataaaatactccttatctttcaaggttatagaaaagattaaatgagacgatagagatgaaacgtgtgctcagttcaagttgttccccttccccccacataatttgcctgtctgcacgggactcattttagatgtctaaaagagtgagatttttcttttctgggaaattctgtttattgactttattgcgtctcctgtctcacagttaagcctcctttaccagacgccaaagtccagatctacgtgcggttaggtgcacaaggccagcggcaggagagtgacgctggggaattcctgcctggtcctcccagccctctgagcgccccccactgccaggggtttggggctcatccaggacacaggacagcattcaaggacacttagaaaagaatgtgcctccagcaggtcagccagccatcctcactagtgcccccaggaagggatggcttgagctttgctgcctccttccaagtctgttgccacactcggtgacactgggatacatctattgtcaaaagaaagtcccagctttgttgctgtgtttttggaggccttgggcaagtccctctatcttttttggcttcaacatcctctgttataaaaagggatgagtaatatctgtgttgccaacctcctggccttggtccacaggccaaatgagatgcttctgaatgaaaatacgtagtaagaagtgaaaaggattgcgatgagtaagcttcttgttggtccaatcagtgccagtccatgctcatttcttctcgaaaagacccactgatttttatagggtaaggagggggaatgattggcaaggcactgaccaatcccattagctctgagagggggatgatttagcatcacctgccttatcaatctccctgccccgcctgcatcctcggcttttggggaggtcaatttccggcacacacagaaaagcctgtggctgtggccgggaacaattggccacagtgctcctctcgtgttgatcctttcatttcctcctgccggggacagcggttctaagtttcgcgctactcttttggactaatcgtttacaacaggcctgagcactcagcccctctctcacttttgctgtccagctactgctctgtatggcaaggtcgctaattgggacgtgatcctggccaaatggcaagagagattcaaggaaccggttccctggacctcaaatatcctgcccccaactttacagctcaggcggccacggaggaagcgtgagtcatacttgagaggtgaggccgcggcttaggaaaggcttcggcaatgacatttttcacgcttttaataaacccctgtattattagaacttgccaaagctgaatttaatgaaagtcttaggccctaaggcctgaatttttcttttgtatcgcaaaatgaaaccaactggttcaattcaaattaaccccagaaaatgtgagggctttatatttctttctttccccccgcctttcttctctctctctttctctgctctctcattttgaaattttgctgtgattacaatctcttggaagaaaaggaaatgtacaggaggaagaagaaatcaaacatgagaaatatattcagatagttacaactttctctatgggactccttaagcagagttacccatcactgatacaagttcatatgagaattttttaaaggaagagaatgaaaaggcaaaaaataaagaggtcctctcaaattgtaccagagacacaataggatttaacattcaattttatgaaagctccttcaattagacctgctaagcatcagtcttgtgcaatactggtgccccccaaacaaacaaacaaccatttcagaaataataaaatgacacgttctttatttttcagatttctgaggcttagcccttggaaactaccctgggggggcgatattaggggtggtaaagtaatgtgccactgggcacctggccttcaactattcagaagctacggtggcaggaaatagctcagcggcagcttccgtgtttgcaggagctaatgaaaagacatcttttttccccctcacagctacgttcataaacaaatgttcactatccaaccttcactcccatttggcacatagttcccaatagagcaggccttcaaatgcctccttgtcctttatggagcagaaaggtacaagggctcagccttcaaggccttccccgcgggccttcctgaaggcaggtcagtcagcctcagggggcacacgacccccactggagctactggactagaaagttacccaagatgtggggagggaaacgactgtagataccctgccttcagcatctagaggcaggcagtcgaagggggctgggaaaaaacccaggcccagagctgcctttgtcttggctgattcctccttttgggaatcaggctcagctccgattcctgcagggaagtccctgcttggcatcaaggctggcctcaggcataagatcctaattatttgaatggtatttgttttcatagctcttttttttttaaaaaatgtgtccaggtcgatggcattttaatgccttattaaacaggggttttacagcagtctgtctgttcagtctctgggcccatgcctgcactttgtgtgcagggattttatctttcctgctggccgaaaatattttccgaattccctataaaagttttcgagatttcctaagacaaatagagctccaccagctctaaaatgaccttgatgccgtcggaattatattcagacacaggctttctcccctgtttacacaaagaactgaacctcacttgtactcatgaactgccgttatgaggacaccaaatttgctccacaaatgtgctggtgcataaaaacacaactgtacctgggatggctcaccagagtcccatactttactggtttcttccatcctctcagatggccgccttggctttgaaggcagcatcaataaagcctgtcctggatgcagtttccataagagtgggcagcagctcccagctgagggagcagccaggcctgtagtgggaacatggctgtcgtgaagaccacagaacccaccccttttgtttacttgcaagtgtttaaacctttgtgaaaatgaagtcttttcagaaagaagctggatttagaaaatattaccataagccacaagtcaggctacttagtgttatggaaaaaacctagaacagacatgggttcaaatctcctttctgacatgctgtagggtgtgatcttgggcaaaataaaaataaaaaatagtaccaggttctttattttaaaaaatggggaaaattatatatgtatatgtctcagggtagttgtgagaatcgatatgaagtaacgtggctgggcgcggtggctcatgcctgtaatcccggcactttgaaaggccgaggcaggtggatcacctgagatcaggagttcgagaccagcctggccaacgtggtgaaaccccatctctactaaaaatacaaaaattagctgggcttggtggtgggcacctgtaatcccagctacttgggaggctgaggcaggagaatcacttgaacctgggagacggaagctgcagtgagccgagattgtgccgctgcactccagcctgggcaacagagtgagactccgtctcaaaaaaaaaagaaaaagaaaaagaaaaagaaaaagaaatgaagtaacgtatataaagcacagagggcaatgactggcaagagtaattgtaaatagtagctactatctccatttcctgagggtccttaggactcagatgagcagaagcacagccactgtgtgtcctgaggctttgataaagattctggaggtgggaggggaaaggaggtctcagagactgagtgtcaactctgggccagatacagtggtaggcggtgaaactagaatttaaattccaatctgactccaagatctgcaagggctggttccactatgcagattggggaaagtgttgaaattaaacatggggaattatgtcagctgcctgcaacacagcctaagcctgaaccaggccagatggggctcattttgtgtaggtagcattaaaaaaaaaaccctccaatagtaactgtgtagccaccaggaagctccctctgaatttctattttgctaggtcatttttcagcattacccttttggtggtatttcactaaaaatgccacatttagtatttaagacagacagacaaataccctgggaaggagtttgtagggatgtccagcccattcagaacattcctgcttattccatgtctgctggtgttaagcacgtcacaaccaaagatggagggttgtctgatggccgcagtacaaaaggacaattaaccaggggtcatgtttatgcttctatggttagaaccagtcatttatttaactaagactttccactttcatggaatcaatgaatactctgaatttcaaggacaattgtatgtttcattccttgaaactctatttgattctttttcaagtcagcttagtcttaaaaattattgctttttctgatgttcacaatctcttcttttttgtatttaattatcttaaacaattttaaaataatctctagatgataattctgttatctgaggttcttgtggggaggggtgactaatctaactgccatttattgggtctactgatatttcacaacagatatttatcttttattgttttataattttatgagaattcatcctaagctaggctttatctcctgtcagattccttcagaaaagttttgcttgcttttgaagactaaccttttatgttgatttttagttcggagatttttagactatgcaggaagtataaattcagacgccaaagccaacagaggacaaaatttctttgtcttatgctgagcgagagggttttttttattttgattttttatttttatttgagacagtctcacactgttgcccaggctcaagtgcagtggcaccatctcggctcactgcaatctctgcctcctgggttcaagcaattctcgtacctcagcctcccaagtagctggaactagaggctcacaccaccacacccagctaagttttgtatttttagtagagacagggtttcaccacatgtcacccacgctggtcttgaactcctgacctcaagtgacccacctgccctggcctcccaaagtgctgggattataggcgtgagccactgctcctggctggcgtgggagttttggggggtttcagctattcataagtctcagtatcgactcctttaatttcttttccccacatgtcagttaagactcaagctcctggctgttttgaagaataaaactggaggggtcttatactacaagaggacttatcataaagccatagcagttaaggctggtgcaaaggtagatgaatgggccactgaacagaacagaaagtccagaaacagatgcacacacatatgatacctgaattaggaaaagggtggcattgcagtggaaaaggatggtgctgggccaattggatatccctatggaacaaaatgaaatttgagtcctgactcataccatacacaaaaataactttcagattgtttgtgatctatatatgaactgaaaacaataaaatatttaaaagaaaacataagataatatctccatgaccttaggctaagcagagatttcttaaagaggacacaaaaaacactgtcataattgaaaactgacagattggtctatattgaaataaaaatgtatgtgtatcaaaagatccactaagataacaaaaaaaaaaaacaagcacagaatagaagatattgaagactcaaatccagaacgtatttttaaaaacttctgtaaatcagtaagaaaaatgcagacaacccaatagaaaaatgggcaaaagacttgtaagggctgtttgcaaaagagaatactcaacttgccaagaaacatatgaaaaggtgctcaacttcaatagccatcaggaaattgcaaagtatgactgcaatactgctatactcccaccagaatagctaataaaagaaggtaatactgagtgttagtggaactttcatccacagctggtgggaatgtaaatcggtacaaccactttggaaaattgtttgttagtatctactaaactgtcaggatcctataactatgtttagtaggaacatagcctatgaccaagcaacttccctcttagttatatccaaaagaaatgcacacacattctttacaaaaggcatgtatagcatactaacagtgcattattcattataatacaaaagtgggaacaacccaaatgttcatctgcagtagaaagaataaataaattgcggaattcatacagcagtgggaatgaatcagttacaactaaatgcaaaagcatagctaaatcttacaaacatcatgttatgcgaaagaagccaggcttaaatgagtacacacctcatgttttcattatacaaactccaaacaggtagaactccttcaatgttgttagaagttagaatagagatttccttggagggatgagtagtgactgaataggttacaagggggagcctctggagtggcggtaaaagactgtttcttggtatgggtactggttacatggttgtgttcactttgtgaaaatacatccaggtgtacaactttaacttgagaaaatttttgaatgcctgttacacttaaaaaaactttactcaaaataagtttatttttaaaagataatcttctgggtgatgtggctcacccctgtaaacccagcattttgagaggcctaagtgggaggatcacttaagcccagatgttcgagaccagcctgggtaacatagagataccccatgtctcctaaaaattttttgaaaatagccagtcggagtggcacacacctatagtcctagctacttgggaggccgaggtgggagaatcatttgagcccaggagttcaaggttgtagtgagctatggttgcaccactgcactccaacttgagtgacagagcaagaccctgtctctaaataataacaacaataataaccataatccttaaccaattattaatagaaaaacaaaatttaagcccttttattaataacacaggttctctaaccccaggtagtcccagcatcagcttaaactcctttagtttgtacatttttggactttgagggtttcttttactttcctgcaagttcagttgcatatttaagtgaatgctgctatatttttatccatcttccaagaggtttctgagcaggagtattttcaggttatctaagtcacaatattgccaaaatcagaagtcttctatgaaaaggtgctcaacttcagtagtcatcagggaaatacaaatcatagccacaatgcataccattatgcccctgttttttaaaatttccgtaagcatttttacttcccaaatggctctgttgtaactgaaacagggatctaagctgagtcaaccatgaggcaaaagacactggcgatttagaatagtcttcagttcacagatgattctttaaacgtcacccaggactcacagatgagccaagtgccttccttgttgtaccgggtaacctatctgtccgcgaaaaggtggggagagagtaatgacaggagagagggaactctgatttgaaagagtttgctttctctttcctttggccttagtgtgtttgagaatgctggttcagattcatttttgaaaggcctgatgataaaatgtgctgagatggagcaaagaaatttaataggcatacggacactaaatcttgtggaactgttagtcttcaggttggcagggagagggttagattaatattgatatagagatactttctcattaggtcataaagtgattatttctttctgttgagtctctatttaaagttttagtcaaattgagaaaaatgtccaaaaccaggatgaatcaggtagtttcagtcctctgcctctgtgctgagttctctagtatatttcatacgggaaacagaaggcggacatggtcctgtagtctaggagcatgttctttcaactgcggactcagaagtagcagtaatggcaacaatgaggggtataattaccacccacaacattggccatatgaaagaaattcccctaacttccttcctctgcatctccaaacttagttcgttctttatttgtttttattgtgcgtggtatttaatacttttccactctattttctaagtggttatttctgagatgtagtaggaaaacggtttttattttgtaaaggattactatgactctcttgagtctggaagtttttatttgtttcctttagattttctagttaatcttgtcattttcaaattatagtcacatgtcacttaacaatggaatacgttctgagaaaggtgttgttatgcagacaccatagagtgtattcacacaaacctagatggaatagcctactacacacttagactatgtgaaacagcccgttgctcctaggctacaaacccgtagagcatgttactgtactgtataatataagcaattggaatataatcgtaaatatttgtggatctaaacatatttaaacatagaaatggtgcagtaaaaatatagtatgaaagatttaaaaaaatggtacacctgtgtagggcacttaccatgaatggatcttgcaggactggaaatggctctgggtgagtgagtggtgagtgaatgtgaaggcctaggacattactatacactactgtagactttataaatgctgtacacttaggcaacactacatttattttttaataataattttgttttttgggacagggtctcgctttgtcacccatgctggagagcagtggcaagatgattgctcactgcagccttgacctcccaggcccagttgatcttcccatttcagcctcccgggtagctgggactacaggggtgtgccaccacacccggctaatttttgtattttttgtagagacagggtttcgccatgttgcccaggctggtcttgaattcctgggctccagtgatctgcctgcctcggcctcccaaagtgctgggattgcaggcgtgggccaccatgcccagctttaataataaattaaccttagttaactgaaggtttttattttgtaaatgttttaatttttaattttttcaactttttaactctttcgtaataaataatacttagcttaaaacacaaacccattgtacaaccgtacaaaaatattttctttcattctatctttataagcttttctctatttttaaaattatttatttattttacttttaaaacatttttggttaaaaatgaaggcacaaacacacaccttagcctaggcctacacagggtcaggatcatcaatatcactgtcttccaccttcacgtcttgtcccactggaaggtcctcaggggcaataacacacagggtgctatcatcttctatgataacaacaccttctggaataactctgaagggcctgcctgaggctattctataattaactttttttaataagtaggagtacactgtaaaataatgataaaaagtatagtaaatgcataaaccgataacacagtggctcattatcaaatattatgtactgtgaataatggcatgtgctgtacttttatatgactggccccacagtgggcttgtttacaccagcatcaccacaaacatccgagtaatgtgttgcactcagacattagggtggctacctaacatacaattttgcagcactattacaatctcatgggaccacctcgtagcatatgtagtaggtcattgactgaaatgtcaactgtattgatatttcaacctctctgcttccttccttcctctcttcctctcttcattccattgttcctttctatcttttgttggatgaaacttactttaacgctaatgataaataaatgcaatgatagatgaccttcttgtcttgactgttttattgaaattcttctagtgttttattgttatattttcttttattatatgtttgatgattgtatctgtttccatttgatcttcaagaacattatttatttactgatttctacatttatcatcttattcctaattttttttcccttggcattctgagtgatttctgttttaggttaacctagacactaaggatgtacaaatcaagagacaaaccacgtctctctgtctctccagtaccaacctctgtattcctattgccttctgggtattgttatttgatgtcctctagataactcaagcttgatgtgttcaaaactgaactcttttcttttccaaaacaaacaaacaaacaaacaaacaaacagaaaactcctcctctgtgtgctaagcagaggttgatgattcatctggtcatctaagcgagaaacctcagagtcaatgttggcttcatctttttcctccctctccttttcacgtatgattggaatgcaagtgtttttgttgaacaaggtccaaagagtggaacagcaaattagaagctttcatgtgcaagttgctatgaatgatgtgaaataagatatggtccccacatttgtagtagtaagaaaggaaactgctatttcaaacaaaaactgatagcagacagttctacagaaaagttacaaaactgattttcagggtagataacattattgtttaggaaaacacctgatggaactttttggctgagaaaggcacagctgagatgtggtagacagagagagagctgaacttctctgtggaataaagtgagaagacttgagtttctgcagagaatcagtgtgaaggggatgggtggcaatcagagatgacagagatgtaaggatatatgagaaggaattagggagaaaagagggcttaaaaagacagcagtggccgggcgcggtggctcacgcctgtaatcccagcactttgggaggccgaggcgggtggatcacgaggtcaggagatcgagaccatcctggctaacaaggtgaaaccccgtctctactaaaaatacaaaaaattagccgggcgcggtggcgggcgcctgtagtcccagctactcgggaggctgaggcaggagaatggcgtgaacccgggaagcggagcttgcagtgagccgagattgcgccactgcagtccgcagtccggcctgggcgacagagcgagactccgtctcaaaaaaaaaaaaaaaaaaaaaaaaaaaaaagacggcagtaagccagaatcaaaggatagaagaatttctctttctttctttctttctttctttctttctttctttctttctttctttctttctttctttctttctttctttctttctttctttctttctttctctctttctctctctctctctctctctttcttttctttctctttcttcctaggaaaaattctctgtcgtggggagggcctggggactttcggaccctgctgtctcgtgttcactcccaagttgtttgctctaccaccttgttagcccttctatgactcccgtaaaaatatactatccctaacagcctgtgtagatggtgttgaaggaaacgaagggtgagggcaataaaaagaagtacagcctcctccacatcacccctccctgaggccagcgtggctggtagcagcaccgcgtggaggaaggacagtttaggactgtgcccttgaaacaaaaccccctttcctcaaggataccagaaaaaaagtgacatttgaaagggggcaggcagacacttggattgcactttcactctagtgcactttgtaactgtgttacaaagcagtgtcagctaggtgccacagagtggtacatgcaaaagacagttggagttcattagaggaaaacagaaacactgaaaatcaccaggtctggggaggcctttgatattcatgaaaatggagtgagatagaagtatctgaataatgccaggtgcagtggctcacacttgtaatctcacctactcaggaggctgagggaggaagatcatttgagcccaggagttcaaggctgcagtgagctatgatcacaccactgcattccagcctgagtgacagggcgagaccccatctctaaaaaataaaataaaatctgaatataaataacaaaagcaacgtgcacaccaacaacacaaacacagatcaatgggctacgagttactaaacactataacaatggctttggcaagtttaagagcacattttaaaaagtaacacaacactcaatatttgctgattaaatgcatgaatgaagaatctgcttaaagtaattcagaatgggaaggtgataaatgaaccagtgtagctgatcaagtgggaaagattgtaaaataaaggaatgaatggcttacaaggaatatttgagatcttgaattagtatgtgtactgaaaaataaatttggctaatgaagaaacaagccgcataaacactagggcatctaattactttaccaacatcatgtacgtggtactagccaggtcaaggtcaattgatgaaaagatcaaccgagggggaaaaaccttagaaagattcttaaattctgcactaaagagcagtaaagacagaattggagggtttgaatccaaacgccactgcaactgcctcctgattcattctgatcataggtggctactccgagtatattaaagtaacagagaaaaacctgtgcaggagggggtgtgtgtgtgtttgtgtgttgtgttcacatgtgtgtttggggtttgggtctgtgtgctgtaacagggatgggggaggataatatgaatgaaggtctaggggacatttttgagtgaaactttgtgattaacaaaataaaaattggagcgcccaattgtactttgtataatcctggcctaaaattttgttcttgtaaataataatattggcttttcatatgacaaatacatgggacgtggtgagttgagttagaatggttaaacacatggtgctaatattcctgagtatttaaagaaaagaatcagaccccaggccaacaattatttctctgctacagtcttcacatgggccaaatgtgtggatgtgagttgggggagactggcggaggacacgtttgtggcagagatcgcagatgggctgagcagtttgactgctggcgaagggctacacttcctaaggcaaagggaacatttgctgagagctgtgtgccatgtaggcagttgatctggaccgtcttatagattctcacaagcaactgaggcgggtgcaattatcttcatttaacagacagcagactgagggtctgagaacttacacagtggataaggattggaacttggtttagataccagctttgttcagctccacagtgaaccctaagtaagggtaaggatttcttttaacaatttcgtattgaccctcaagaataaataatctttttgcgactctgatagctgtttgacactaagcaaaattcccctagaacaggtgaaagttatcaacaaagcctgtgctttttgggggcctctagagacagactcctgctttgaaaaaaaatgtgtgtgaaataaactgaatcaactccagattcctcccaaccagtactactcaacaggcaccgggggaggcactcactaagggtgaactaaatcccagcttatttttcctcctacgagaaacaattatataagaaaagtatgaagatagtaattacaaactatattaaaacttttgcttatcaaaagccagcataagtaagtgaaaagataagttggtaatatatttgcaacacattagctaacaaagatataccacatgtaaagaatgtctatacattaataagaaaaagacaaacagttccatagaaaaccagtaaaagatgggcactgtggcatgcacctgtagtcctggctactcaagatattgaggtgggagtctcatttgaacccaggagcttgaggctgccgtgtgctgtgatcgtgcctgtcatagcactgcacttcagcctgggaaacaaaacaagacactgtctcttaaaaaaaaatagttgggcaaaaggctggaacattgtattagtctgttttcacactgctataaagacactacctgaaactgggtaatttataaacaaaagaggtttaatggactcacagctctgcatggctgagaggcctcaggaaacttacaatcatggcagaaggcaaagaggaagcaaggcatgtcttacatagtggcaggagagagggagggtggggaaactgtcacttttaaagcatcagatctcatgagaactcactcactatcacaagaacagcatgggggaaaccgccccatgatccaatcaccttccaccaggtccctccctcaacacatggagattacaattctagatgaggtttgggtggggacacagagccaaaccatatcaaacatgtacttcacaaaagaacaaataggactgactgataaatgtatgaaaaagatgctcaatctcattgaaaatcaggaaaatgcaaattaaaatcacaaagagttaccgtttcacctttactagattgtcaaaatataaaaagtcaaataaaaccaaaaattaaaagaacatagagcaactgaaacaaatacacactgttggtggttgtgtacaaccatttggaaaacaatttggcattatttgggaagttgaagacgtacaaactctataatccagcagaaagaaatccttggagaaattcttgccatgttacctgggggcagatacggtaacgttcaaagcagtattgtttgcaatagcaaaacactggaatcaatccaagtatctatcaagagacggcttgttaaatacatttcagtatagtcaagcaatggaatattaaacatgagtgaatgttgcaaacatgttgaatgaaagaagttgcagaagggtacatacagtatgatacctttttttttttttttttttttgagacggacagagtctagcagtgttgcccgggctggagtgcaatggcacgatcttggctcactgcaacctctgcctcccggattcaagtgattctcttggtcagcctctcgagttgctgggattacacacacctgccaccacacccagctaatttttgtatttttagtagagacgaggtttcaccatgttggccaggctggtcttgaactcctgacctcaggtgatccgccctccttggcctcccaaagtgctgggattacaagggtgagccaccacacctggcctatgataccatttttatgaagctcaaaacaaaaaactgaacagtgtagtttaggtttacatacttacatagacttacgtaggtgagccacatgtaacgaacatgccagtaaggatagtgcagcctgcaaggtataagaggagaatttgaagttggggaggaatgcataagattatttggtggtgtgagtgacttttttcctagcctgtgttttgggtgcataagtttttatcttactattcttttgcctaatatacactttgtataattttaaaacatggagaatgaaacagtactaagagcttggaaatgtactggctttaagaggaacttcactaacttctcctccttatcagttaatatgcattgaacacttttatgttgccttattgactccctttggaatggatttgtggtgaataaaggattagacagcagcaggtaaaattgttaactgttggtagatcagcagtttgctgctgacatttaaaaaggaaaagttaaacctcaggtttgactgacccctaagtgttccatgggcatttcggtggtaccagtattaatgaagatgtttctgaaagtccctctgttaacagaatccttgtttccagagatagaaatcatgttggtggcctggggttgggctcagagccatggattcctctccctgtttccaaaccaggcactgtagccagacattcccttgctcccctgagataagtctcgactcccccagtctctcggcctatttgggatctagggacaacctcttgctcaggaatagggaggtcccatagggtggttgccctgctgctgctctgcctttccttcagggggacatacgcctgagctactattctcgcttctcttcctgaaattatcaaagccccaacacttgggaagatgaggctctttgaacttcttgcagatcaagcagactggtacgagtgccaagttgcctgagtattaattacccgagctaagtcatgtgattcaagctctcacaactctcagggtcccctgcgatacttgcaaaattatgaaatattagcttcttgccacgtcagattcctcaaacattgggatttataacgtcattcttgggagctttctcctggggatttattctttaatgtagctcatattttgaatgtctttaccagcctcagtgaccagtgagaggtattagaggatgtggaatgagtggaaatctgaaaatgaagaggttagagagctttccactaatcatcactgtagataccttcacttctctgagttacctatatgttgctaccaataaaagtcagtctattacatgtgttgacatatatgatctttcctgtttacagaaaaactgaacggagagtataattatctccaatttaataacaaaagaaatggaggtttaaatacatattggtcaaggtcacagaacctgtaaaaacctgaatcagctgctgactccaatcctctaggaagctgcctccagttggaaattgaaatgtcttttcaagcaagaacagcttcaggccccagtggtaacggtaaaggtcatgtgacatgttgctctgaagatgcaacaacattagattctacttattttcactgctctagttcagtgtgtagggaatctgtatttctggaggaacaatattactttttcataacacattttctgcacattcacagaggcagggctttgctgcatcatagaatcacaatttaggagcccatttttaccaaacaaggctttgggggtgtttataggggtccccaaaatgtctgaaactagacatgtctccatttttgagcacacagctttaaaaaagctaagagactggatgccaaacttcagcccagagtgaatttttacgacttgcactgtaaacctatgaaattaggggtttaaaatggaaatgctgacacaatctttgcacttcatagaacatcaagtgctggtgggggtagtgctctctgctcactgctgctggcccctgctgggctaggaaacttcctgtccagctttctttactttggggcctctggttctcttctagacttctccaagcctccctctggcctggctagaaaacacagctcagatataagcccatctgcagatgttcagggtcaggctctgaactggctgtggagtccagcctggggaagctttactggtttcaagctctctggtgctgccttggactgctggccaggacctcctggcctcaaaccttccgagtgcccctgaaaggcactgcttggggctatgttccttctagggccagcgaccagcttcctgtgaacccttctatgactgcagaatggaaccattcctgaggcatccagggctcccgctggatttactagtggcttttgctgagtgctgagtttatatcctcctgaaaggaaaacctctattaaaaactttttccttcatggcagtaaagtgacagatggtgattgctgtctgaaagttaccctagatcagcttggcttcaagcttacagactttgagtctgactgcctggattcaaatcttccaaatacctacctcacaggattgttttgaagattaaatgaggttggttgggagtggtggctcacacctgtaatcccagcactttgggaggccaaagcaggcagatctcctgagatcaggaatttgagaccagcccggccaacatggtgaaaccctgtctctactaaaaacacaaaaattagccaggtgtagtggcagacgcctgtaatcccagctactcaggaggctgaggtgcaagaatcgcttgaacccgggaggtggaggtcgcagggtgccagtgagctgagatcatgccactgcactccagcctgggtgacagagcaagattctgtttcaaaataaataaataaataaataaataaataaataaataaataaataaataaaagtgatatatgcaaagtgtgcgacacgccctaggcaagtattgagtgaaggtagtggtcttctatcttgaagcaagagacagggtacggaactgagaggactggttctgagaggcctgcacatgaatgaacctaagggagagaagaatggaaattgatgacttcaaaataaaattgtatttgcacagtgcttcctagtgtataatctcataatttaatcagagcacccctctaaggaagatgatctcaattttatagactgtggctcagagaggttaagcgtcttggacaaggtcatgcagggagtaaatgaaaagccagggcttgaaccacgtcctgattctaagtttggtgctctttccacgacttcacagatttcttctgtttcatagatttcatgataaactagaaggtgtgggagtaatagtgaagtccttggccgggtgcagtgacccatgcctgtaatcccagcactttgggaggtcaaggcaggcagatcacttgaggccaggagttcaagaccagcctggccaatatggtgaacccctgtctctactaaaagtacaaaaattagctgggcatggtggcatacctctgtaatcccagctacttgggaggctgaggcacgagaattgcttgaacctgggaggctgaggttgcagttagtcgagatcacgcaactgcactccagcctgggtgacagagcaagactctgtataaaaataaaaaatttcaaaaaaaaagtggagtcctcattaccttatgggttcttaattttaaaagactgattttataccttcaaaaaaatgactcattatttaaagaaagtgtattccatttctttatcactaaggactccagaacatgtaacttggagttagtacaagtgaggctccaatgagcatttttttttcttttttttttttgcgacagagtttcactcttgtcgcccttgtcgcccaggctggagtacaataatgcagcctcagctcactgcaacctccccctcccaggttcaagcaattctcatgcctcagcctcccgagtagctaggattacaggtgcccaccaccaagcttggctaatttttgaatttttagtagagacagggtttcaccatgttggccagactggtcttgaactcctgaccccaggtgatccacccgcctcggcctcccaaagtgttgggattacaggcgtgagccaccacgcccagctgagcatattagttttaaaatggaattaaattgagttttctaacttaattcctctttcttttatactttctccaattttagcttcagtaattttctttttcttggagattctcataatacctttccatccatggtcagaatttacttgcaaaacaacagagtaaaacagcataaaaataatggaagctgcttaagtgtttcatggggccgggcaaggtggctcacacgtgtaatcccagcactttgggaggccgaggcaggcggatcatgaggtcaggagatccagaccatcctggctaacacggtgaaaccccgtctctactaaaaatacaaaaaaattagccgggcttggtggcgggcgcctgcagtcccagctactccagaggctgaggtaggagaatggcgtgaacccgggaggcggaggttgcagtgagccgagattgcgccactgcactccagcctgggcgacagactccgtctcaaaaaaaaaaaaagaaagtctttctaatttgcttagatatctaacccccacgtaaatgtgggcatgaaataattaagtaacaaaactctagtttgctacagtcacaaaggaaggtgtgatgtaacccaagaactgtcatttcttctgcacgttggagaagactttttcaggttgttctgttctcttcctaaaaaaaaaaaaaggaaacagagaaatggagagaagataaaaaaaaaagcaagagactaacagatatcaaagctgtgcgagagagagtggctgtggcatgtattttgcagggcggagagtgaaagaaagtgaactttcatttgtaacagctttaaatggttctgttcaggagcagatggggaacaattttgctagtgctatggaaatacagttcgaaggactgcaatcacagaccaaactctcagcaactgcagacagagaagctgagaattttctgtaaatagttaaaagcatctggacaaggtagaccagtaggaacataagacagcatggagctcagaaagtcagcagtcaatgtacacaacaaaagagtcggaccaggagagagacaacccaccagttatttagtgtaaaatgattggtgcttaatattgaaactgtatgattgtataaaagaactgatgattatagttgagtttagagatttatgtttaaattaaataataaaatatagcttattctacaatgtacattttgtcctataatatacattttattatataatatacatttagtcaaacctttaaaaggatcaatgagatccttttaaaagtcttcatgggccaggcacggtggctcactcctgtaatcccagcactttgggaggccaaggtgggtggatcacctgaggtcaggagttcgagaccagcctggccaatatagtgaaaccacgtctctactaaaaataaaaaattagctgggcatggtggcgcacgcctgtagtcccagctactcgggaagctgaggcatgagaattgcttgaacccgggaggcggaggttgcagtgagccgagatcgcgccactgcactccagcctgggaggttgcagtgaactgaggtcgtgccaccgcactccaaaaaaaaaataaataaataataaaaaataaatttaaaaaagtctttatgaagtcttgagttcgaacagacaaaatcctttaactattcatgatactcgaaccaagtggattccagctcccaactataggctgggattttgatgccaaaaattggcaagaaagacaaaacagctgagaatagtgcctgatgaaggtgaaccacacttgcaactgcttatatgtggtcaggtttgtgttaatgactctttatgctgtggcattcacaaaatttctctctcatcttgggatttttcctctttctttttttttttttaaagacggagtctcgctctgtcacccaggctggagtgcagtggcgtgatctcggctcactgcaacttctgcctctcaggttcaagcaattctcctgcctcagcctcccaagtagctgggattacaggcacccaccaccgtgcctggctaatttttgcatttttagtagagacggggtttcgccatattggccaggctggtttcgagctcctgacctcaggtgatccacccgccttggccttccaaagtgctgggatttcaggcatgaaccaccatgcccggcccctctttcttttactggtaagaaattatagccgtactctgtctctcagcttctcatgatctcagactcctatggtctcaccattattcctttcctaatacattccatattttaggccatatatctcccctgagccagtcagagctcagtctctccagaaacacagctataaaccaggaagaaagggaaaatgaagggttaagtaaagagagagaatgaagctttatgtatcacctgctatgtgtctagaactctgttatatactttatatatatttcctcacttaatctttgtaactgtatgatatcagtcttatttactctatcagatgatgaatctgaggttcagagagattgaacaacttgcccaagatgacacagctaacaagtagaggagttaagatgcagatttgggtctgtctgattccaaaactcatattctttccactgcaccacactgctttccaaaactttatctgaataatcaagacttgtgttgcaaagtatgaacccaaggtatatgatgatttattttactcatatagctagtctaaaaccctcacatagaacttgtgagtcacagttgtctggttcctaagcctagagctaattagaaagaagtagcaaattaaaagatgagggaggattttgtgagcaagtgcactgactacagtgagaagaggcagatggcagcttgatagtaagaaaaaaaccacattcaaaagcagatatggctgggcgtggtggctcacatctgtaatcccagccctctgggaggccaaggtgagcagattgcttgagtccaggagttgcagaccagcctggacaacatggtaaaaccttgtctctacaaaaaaaatacaaaaattagctgggcatggtggcatgcacctgtagtctcagctactagggaggctgaggtgggaggatcgctcgaacccggggaagttgaggctgcagtgagctgtgatcatgcctttgcactccagccagcctgggtgacagagtgagaccctgtttccaaaaaaaatgaaaacaaaaacaaaaaaaaagatataagaataaaagcatataaaaattaacaaaagcttcacattaagtgatattcatactaacaactgctatcatctaaatagtacctactaagtgtcaggctctgtgctagacacaatgatttttaaaactcagagcatttccactattatttgttcacaatgggcctctgcattaatttcacttgtaaaaagaattttcgggtgaacagtactttaaaaaactaccttttatcacataattctcaaatcatcattatgaagtttgattctagcgctcccattttacagatgagaaatgggagctgaaaaacattaagaaatttgcccaaggtcacatagctattaacagcaggagccaatattccaacacaggtctgctgacttcggagtctgtgttctttccactgtcatgctgcctccacatttatagggatggcgctgagtcattaaaaaaggttaacttatagccctttaagaagccagggaaattacattgcttaaactggtggaaaagtgtacttaaatggcaagcacccagctacctgggaaactgagctctttggaatgtccagatacataataacaggggagctacctacacctttcccaagtttacctttacatgagtgtaattttgtaattgtcatgtctctttcttgaagatgtacttacatagtaagcataagaatgatacaattttcagttggaatgtgcattgtcacaccttcatggcaatgactttgttgaaccaccattcattaatagaatctgcacatacacataatttataaagtactattcataaaagcacattttgtgaataacaatctgtgggctgcagaagcagtatctttcatgacatctttctaatgatcttgtcagaggggaaagtagttataaatcatccttcaaatcccttaaaggttgagaggtaagtagtaactagtcatcttcagaactcattggatttacaagtttatccttgaataggttcatgactgagagtgggcctcattaatcttaatcatatcaatctgagtacctagtaaagttaggtcagccatggctgctatcagagacagtcaggacgtactgcagacaagaatgcactcagttcgtagacacacatacccaggccagataacagccagggatttaggagagattctctggagacacaagtagtctccataatgacaatagctagagaaaggctcccagagccaaacacacagctaataaaaccactgaggtgcagggtcagaccagacttaagctcagattcatccagaacattaatggctctattaaaaaaaattcaacagaaaccttgtatgcaacaagtggccaatttggggcttccatgagtagactgtgattgtcctaggagacagggctggatagcatcaagctcaggaagaactctgctctgagccctccattttagatgtggggagatcaccacaaaatgcagaataaaagggaggggggtaaggagaaaccacatcgtgtagacagatttttgcatttgttggagatgagagagaagagaatggtacaattttcaattggaatgtgcattgtcacaccttcatggcaatgactttattgaaccaccaattcattagtagaatctgcacatacacataatttatgaagtactattcataaaagcacattttatgaataataatctgtggactgcagaagcagtacctttcatgacatctaatgatcttatcagaggggaaagtagttataaattatccttcaaatcccttaaaggttgaaaggtaagtagtaagtagtcatcttctaaaagactagtctaaatactaaaagtatagattgacctgaccagagaagcgaagacgggtcatctgtcacacagtgtcgtgaacctaactagttgggtcagtattttccaatatttttaatcttgtgaaacatgcaaacttgccgggaagctgcagggtagatattcttctctcctctctccatctctccagccaaaatagctcgttcacttactctgttgaatttctcagagagtctgtaagctccttatgcgcaaggatatcatattttatacatccctattttccctacaaagtctagtacaagaacacatagtaggcttttggtaaacctttgtggattttaactgccctttctgctttctgccactacacagagaagatattcaccctcttctctcattgcttttattaactaaacttcttaactcttggtcaaaaacttttaaagtgtgaagaaacacaggacttgaaactgacaaaggaagcccttgtgatatatacaaaggtctcaacaaaggggatgagaacctacgttaggtgatttgatttcagccatccttgatttagtgagctttcagatttgcaccttactttacttttgttttgttttgtttttttctaggtttaagctttgtcttttccctctctctttttcttttttaaacctttggagaacttttattttatgcttccttatttagctttgtaacaacaggagtaattgctttaatactgcctgtcactaacgcatttttaacagctttattgagatataattcacataccacacaattcatccacctaaagtgtacaactcaatgatttttagtgtattcacagagttgtgcaactatcatcacaatcaatttcagagcatttttatcacctcaaaaataaaccccataccctttagctctctctcccactcccttttcccctcacgcttcctagccctaggcaatcactaatctacttcctgtctctataaatttgcctattttggacatttcatataaatgcaatcacacaatatgtgatttgtgacgggcttttttcacttagcataatgttttccaggtttgttcatggcatactatgtatcagtgcttcatcctttttatacccaaatactattccattgtatgcacagactacttttgtttaaacattcatcagttaatggacatttgcattgtttctgcttttggggtataatgaataatattgttacagacattcaagtgcaaaccagatacaaatattcaataacaagtattgggttgtttgaagatgtggagaaattagaaccctcacacactggtttggaatgtaaaatggtgcagctgctttggcaaaatgtctagaagttcctcagtcatcatagttaacaaatggcccagcaattccactcatgggtcttttttgattctagccatcctagtagaagtaaagtgatatctcattgtggttttgatttgcatttccctgatgactattgatgttgagtatcttttcgtgtgcttattggccatttgtatatcttctttgtagaaacatctattcagatctttttccttttttttttttttttttttgagacgcagtcttgctctgtagcccaggctggagtccagtggcacaatcttggctcactgcaacctccgcctcctgggtctctgttcaagcaattctcctgcctcagccccccgagtagctgggattacaggaatgtgccaccatgcccagctaatttttgtatttttagtagagacggggtttcaccatgttggccaggctggtcttgaactcctgaccttgtgatccacccacctcagcctcccaaagtgcagggattacaggcatgagccactgccctcggcctccttttcccatttttaaattgagttatctttttattattgtgatacatgtccctaatcagaaatatgattgcaagtatattatcccattctgtgggagaataaaacaacacaatattttacatcaatatttacatcatgaatatacgtcagtagaatagaactgaaaatctagaaatcctatgaagcctaatgtatctttatgccagtaccacactgtccggattaatgttgccagtaccacactgtccggattgatgttgccagtaccacactgtctggattaatgttgtcagtaccacactgtctagattaatgttgccttgtaataagttttggaattgggaagtgtgactccttcaactttgttctttttcaagattgttttggctattccagggtccatcaactttctacatgaattttagaatcagtttgtcaatttctaccaagaaactagctgagattctgatagggattgtgctgcatcttgccatcttagctatacgtcttctggtccacaaatatgagatgttttttcatttatttagatctttacatttttctttcaaaacatttttgtagtttccagagtatagttttatacatcttttgttaattcattcctaaatatgaattttttttatgctattgtgaatggaattctttttaaattttagtcaaattgttcattgcaagaaatgttcatagaaatacagttttaggctgggcgtagtggctcatgcctgaaatcccagctgcccaggcgggcagattgtctgagctcaggagttcaagatcagcctgggcaacacggtgaaaccccatctctactaaaatacaaaaaattagctgggcatggcagcatgtgcctgtggtgccagctactccggaggctgaggcaggagaattgcttgaatccaggaggtggaggctgtagcgagccaagatttccccattgcattccagcctggatgacagaacgagactctgtttaaaaaaaaaaatgtatttttgtatgttaattgtgtatcctgaaaccctgctaaactcatttattagttctaataatttgtggatttcttagaatgttctacatagatcatatcatcagcaaatatggatagatttagttcttctttcatcttctgttttttggaagagttggtcaagaatgggtattaatttttctttataggtttggtagaattcaccaatgaagacatttttctgggcttttctttgtgggtagtttttttttttttattactcatccaatctctacttgttatcattttattcagattgtctattttttcttaagtcagttttgataatttttgtgtttctaggaatttttccattttatttaggctatctaatgtagtggcatacacttgttcatagtattcctttataatccccactttcatttccaatcctagtaatctgagtcttctctctttcctctttggtcagtctagccaaacgtttgctaattttgttaatcttttcaaaaaccaggtttttttgttttatttaattttctctgttgtttttctgttctttatttcatgaattttgctttgatctttttatttccttccttctggttgcttaaggcttaatttgctcttctttttccaatgtcttaaagtggaaagttagcttatgaacttgagattcctctttttttaatataagcatttatagctataaatttccctctaaacattattctagctgcatcctataagttttggtatgtcatgtctgaattttcttcgtctcaaagcattttcgtttttttttgttttgttttttttttttgagatggagtctcactggaatgcaatggcacgatctcgcctcacttcaacctctgcctcccaggttcaagcgattctcctgcctcagcctcccaagtagctgggataacaggcacccaccactacgcctggctaatttttgtttgtttgtttgttttgtatttttagtagaaaaggggtttcaccatgttggccaggctggtctcgaacttgtgacctcgtgattcgcccacctcggcctccaaaagtgctgggattacaggcatgagccactgcgcctggctatctcaaagcattttctaatttcccttttgatttcttccttggcccattggttatttaagaatgtgttaatatccccatacttatgagttttccaaagttctttgtgttattgatttctaatttcatttcattgtggtaagagaacaaacttggtgctatttttatcctgttatttttatccttttatttttttgaggcttattttatggtctagcatatggtttatcccggtctagcatatggtttatgctggtccacttttcttaagctatagctgcagattccttagatcatgaagagcctgaatatgatagaaagaagcaccatcaaactgggttttaactccagcttttctgtttagcaacaatatggccttggaatgtccattttccctctctgggattcagtgtccctatttgtataaagaagaccagtttagactagaagacttctaaggctaaagggctggttttaaattccaattcttagctgggtgtggtggctcacgcctgtaatcccaggcactttgtgaggccaaggctggcagatcacttaaggtcaggatttcgagaccagcctggccaacatggtgaaaccccgtctctattaaaaatataaaagttagtgggcgtggtggcgagccctgtaatcccagctaccagctacttgggatgctgaggcaggataatcacttgaacccgggaggcagaggttgcagtgagccgagatcatgccactgcactccaggttgggcaacagagcaagactccatctcaaaaagaaaaaaaaaaaaatccaattctctcactagtctgaataaatcctttaatctctctggagcgaagtttccttatctctaaaattaggataataatacctacatttcctgagttgttttgagaatagaataacatatgcataattactggcatatggtagcccttcaataaatgagctttgttgttgttgttttaatgatgaaaattttctatttgtcctatggtccaccataacacaacaggctaagttcacctcatacaaaaacttatctgtttggcatttgctccccaaagccaccagctgatgtggcttgtgctggcccacttttatggtccactttcaggatcccatgtatataatatactagaatgaggcatttcatcgtagcatcaatctgagcctcaatgaggcttcttacataaatgacattttctgttttgtacttgatgtctactttcctcttcagagatcatggtatttcataactatttgctttataattctatactaggtagaacttctcacctacagggtgtgtaatcaagttttctaagatgtggagaagcagccagagaaacctgggtctcagggaagccttaggacatggtatgtcctaaaaatccagcctcataaaccctctcattttaatttctttgagctccttgtcttcagtcactccacctgaacataaagcaaacaagatcgattttgaaacccagcagggaagaagaaagaagaaattctatcagactgatgtaggaggtggaactctactctggaggtggggcttggacactggaccaaattgaggactagctaaaacatccagggcagaagcaccttcccgtaagacatggccactagtgtgccatgtcagtttatcattgccatggcaacacccagaagttaccacccctttccctggcaaccaccaaacaacctggaagttaccaccctcatcctagaaatttctgcataagctgccccttaatttgcatataattaaaaagtgggtataaatatagtacagccctgcctctgagctgctactctgggcacattgcctatgaggtagccctgctctgcaaggacccgtacactgcagcttcaataaaagttgctgtttaacaccaccagctcgcccttgaattctttactgggtgaagccaaggaccctcccaggctaaaccttgatttgggggcttgcctgtcctccatcaagaccatgcaatatctggaaataggaggggctgaatctgagaatagaactcacggcaccaaatttatagatcttataaatatgggagaggaaaggaaaggtcattttttggggggaaaaaggaaaggaagttcatctgatgcttactgaggttatccagctactgacgcctgaagaatcaactcaggtgtgaatagtgattgtagggtaaagcccctcttggtaagatactcctggcataggatactatggtagagaatgaatgggaaaatggcaggcattacttcaggtatttaagctatgtttctttgaagaaagttggttctcagttgtgccacaaaataggaacacaaagagtggtgaagagtgagtaggtggaagctggagaagttgtctccacactcacacactctttctttccaaagattaagtctgttaacaactccactatctcaattaggccaggttttggcaatgcaggaatgcagtcaaggataatttattcctagtcaagaatttactaggagtctaccaggtgccccatcccacatcccagaacagcaaattcactagaggaattggcagcttttccaaacctctacactagaccaggactccaaacgtgtagcagccacaatgctttccttggaagagcctccgagcttttattagctttttgctgtttttctaggttaaacccattggaaattggattctctttaaaaagaagtctattttggttgagaatacagagtatgtggaataatcaagtcaggtaatctctggggctttggattaagaattctctgcccatgatgcatcatatttagcttttatttttggtgaaagcctagtctaagaaattgtatgaaaaaataagtaaacaatcacaatctttggagaatagaaatgatgtctgacttagctattcggtgagccttgaagattctggctttgtccttgcatgttttaggttaacaggtgtttccagacaaacgagtcatgtttatttaaggccagtattggtggccagtaaaaaggctggacttcttggctctcagatgcagtgtgattttggatttttctctctactacattaaccatacattctttaaagagtacttagagtcctgggaaggatgtaaaatgtcaacactgaactaagattacaaaactcctggaatcatagcaaacatgttgttaaggatcaaactgaagatgtgcaaatcaaaaacaatactttaaacatactctcagcttttcagttcattctaaaaactcaacgattgctccaaattcagggcaatggcacttccctccccttctaggttcttctctgaagagctcggggcactttccagacatgacttcatttactctccctgcaactaacagtgtgggagagaagagcagagctattctctatatattacttattgaggaaaagtgtcctagaaaagaaacgatgttagagtcacatcagatgttaggtgaagagttgtgtgccttttttgcctttgctaagacaaaatccatggaacgcgaaagctgggagaaaacttagataccatctagtgcggtgatttcatatacaagtaaaatttcaaaacaattttaaggatcagctacatatttggccgaaagaacactagaaaaacaacatttgtcatcccatgaaagcagggatattacaacgccaaagaggtaggaagaacaacctcaaaatacacagtagtccttctcagtaaaggaccatttgcaactttatatcaacacacacacaaacacaaacacactatatttccctagtttttctctttttatcatcatagaccaacttcagtagaagggcagacgtacaggaatttagcccacacctttattttacttatgagaaaattaagagctggaaaaggaagtaggactgccagataaaacacaggacaccctattaaatttgaatcccatgcaatattctggacatagttatgctccctaataatttgttgtttatctcaaattcaaatttaacggggcgccctgtatttttatttgccgagtctggcaactctaaaaggaagtgacttctagttacttgacttgaagtaaccgtgtttaatagtaaaattagaaggagaaatcagttccgagtccagtaaattttttttactatactgtgctaccttttaatgcatcatagtcctgctctaattcaatataattcatcacccatgctaattcacagcttgggtatctacaatcacctgcccacctctaattctaatttcattgtttgtaattctgatactttcctctttagatcccaaagattctccctctatactggcagttattcaaactttttagcctcaggaccctttattcttaaaaaatattgatgatcccaaagagttctttatgtatgtgaattatatctatcagtatttagtgtactggaaactaaaattgagaaaaaatttaaatatctttgtattaattcatgaaaaaataataagcccattacatgttaacaaaataacaaatttaattttttaaactatattttccaaaacaaaaatatcaagaagagtagtaatgggtattatctattatttttgcaaaatctctttattgtctggcttaacagaagacagcagattctgatatctgcttctacatttgatctgttgtgaaatgttttggttgaagtatatgaagaaaaagtagcctcagccaggtgctgtggttcatgcctgtaatcccagcactttgggaggctgaggtgggcggatcaggagttcgagaccagcctggccaacatgatgaaaccccagctctactaaaaatacaaaaattagccaggtgtgatggtgggtgtctgtaatctcagctactcaggaggctgaggcaggagctactcagaattgcttgagccagagagacagaggttgcagtgagctgagatcatgccattgcactccagcctagacaacagagcaagactccatctcaaaaaaaaaaaaaaaaaagaaaagaaagaaagaaaaaaaagaaaaagaaaaagtagcctcgaacagacatgtggttgaaaaaggaacgagtgtttcaagtaacgtttggagatcattgtgactatttttaaatgttacaccaaaaaattgatatttctttcaaaaattgatacttctttaaataaattgatagtttcttaatgattagttgcagtgcagaatgcaaaaccttattaataaaattttgtattcctttacattaaaatcattggcctctcatatactttgagtggattacttctccatgaatgattttgtcacataattcattggtaacttggaaaacattagttcactaagtcatgcagatcctccaaatgttggcacatttccttatacattatcaacaaatcacatttgttaatatttgtgatatttgttaatgtcatcattcacgtgatcaaaaatgactgaaaagttttctgaaattctgtttttgtttgaaagttggaattttattgttggcaacaaatactatatgctttgttgaagtggcaggcttgttttctcatcatcgagaaaatgtctaccaaatctgagtaaccaaaacttgtctgtcagttgtttttcaagtaaaaataaggtgccatgaaaaaaagcagtgaactcaatttgccactcaaatgattacaagatagttttccttgaaatggtcattgtcctttggtatgcagcacaagtgcctatgtgtgcttctcattttgccacactggcccttaaaaagtcctttaccaagagatgagatttagaaaaataaatgttacttcatcaaggatattttcaaatgaaactggctttttttttttttttttccaagacgtagtatcgctctgtggcccaggctggagtgcagtggcacaatctctgctcactgcaacctccgcctcccaggttcaagcaattcccccaagtagctgggattacaggtgcccactatacccggctaatttttgtatgtttaggagagatggggatttcaccatgttggccaggctggtcttgaactagtgaccttgtgatccgcctgcctcggcctaccaaagtgctgggattacaagcactttgtaatcccaccacgcctggcctgaaactggctatttctatttgttgttttgtttctggttttaatgtgagtgcattgcgatgaagaatgcagtgactactaaccagtacagtttggtgatagcagttttaccaacattacttttcaaccatcagtgcaaatgtcaacatactgcaaaagacaaattatgccttaagattattaagaaaatagttttgccctttggaccccctgaaaggaccttgggaaccctcagtggtctgtggaccccactttaagatccactgctctataccacctttgctctaacacgctcagaaccagctgaaatgcttaacaagaaactcaaggctaaaactcattaagagggacaactctttcattccaactcatcaccacagtataaacctgcaaggaagcctttttctttatcaattatgaaaagatatctgtggcctatgacagaataacctagattctgtgaactgctctcaaatgcatgttgttccttgggtctgggatgttccttggccatctcctactcctaattctacgcatgcttctgggaagtgttctcaaatcccctaagactaaattcccattgcattgtacttatcatcatgggcaggggttaggagagcagggagaggagaataacattaagtgcctactgtatttcaggcattatactggatacttaacatttaatgcttacaaaaactgtgcaaattaattttatagtttagagagggtaaaaatgtaggtactaagaagacctgtttgaatctaaagctctttgtactcaatcatgggttcgttttctattgcttagggaaatttgatttagttacaatttctcttatcttcaaatttataaaggggtttaggtcaatgatctctgattcttagctctttattgagctactgaccagttattcagcaatctatatcgagattgataaccatcattttttacacttctctgcaaatcagagagggctgaagagaagctatgacagagatgggctggggaggagcagagagtggggtgaggaggctgtgatggtatgaactctgaaaagatatattcagcccattcatggaaatcatcagatggctagaaattgatattcaaagtcatactattagaaaagaagagtaagcatacagggcataattttgaaaaacaaaataaaacaaagtggggaactttgtcctgccaaaaatctaattgttttgttttttgagacagggtcttactctgtcacctagattgtagtgcagtggcacaatctcggctcactgcaacctctgcctcctgggctcaggtgagcctcccacctcagcctcccaagtagcttcgactacaggcacgtgccaccacacacacgtgctgattaatttttttattttttttattttttttttgagacggagtctcactctgtctcccaggctggagtgcagtggtgtgatctcggctcactgcaagctctgcctcccaggttcacgccattctcctgcctcagcctcctgagtagctgggactacaggtgcccgccaccacacccgactaattttttgtatttttagtagagacagggtttcactgtgttagccaggatggtctcgatctcctgacctcgtgatctgcccgcttcggcctcccaaagtgctgagattacaagcgtgagccaccacgcccggccttttttttttttttttgcagagacaggagtttcactatatttcccaggctggtctcgaactcctgggctcaagtgatcctcctgccttggcctccccaagtgctgggattacaggtgtgagccactgcacctggcaaaaaaaatctaacattttgacgcttgatactgtaaagttataatgcttaagacacaaaaatcataaactaaaaaggaaaagattggtgaatttgactattttggaagttaaaacttaagtttatcaaatgacctaccatagaaaaaatgaaagacaagacacaggctagaaaaagatatttgaaatctagagaacccacaaaggataagtgcccaggatacacaaagaatttctacaaatctttatgaaaaagacaaataatccctcaaaaagggatgaaagatagaaaattatatttcacagaagctgaaatatgcatgggtggtaaataaatagatattaaacctcactaaataggcagagaaatgagatatttcacatccatcagattaacaaaaattaaaaagtcttttaatgctaagtgttgggaagataatgaaacagaccctgctggtgggaatgtcatttgactcaatgattttggaaaataaattgataataaatagaagaagcgattatgcattcatgccacgactcaccagttccagtttgcggatatgttctagagaagttctcgttcatgtgcacaaaaaagatatgcacaagaatgttcacactagcaacgttaataatcgtaaaaaataataggtaggctaaatgtccgttcacaggaaattcaaaagtagatggtggtataaccatgcaatacaagaacatagaggagtgaaaattagtgagagctccaggtatctatgtggattgctgtaagacacaaaatgttgacagaaaaaaagcaattttcataggcatacacacagattacgtttctataaggtgtttaaaaatggatattaatactatatattgtttaaagatacaatacatatatagtaaaatatacaaaagtgcctggaaatgataaaatgctagattccctcatctagcggattggaaggaggctacagctagggaaggcgacacacagagagcttcaattttattgctaatgtttaatttcttaagttaggctgtgggtagagaggtgtttgccacactattttttacacattttttatgacataatgttttttaaacccaagggcaaatgtctgaaaaatatttttttaggcgtctcaaggatatatatcttctctgggcagccaaacctttttcttctattgttttttaatcagaatattgatttttttcatcagttggattactttaaggcatagtttcagacaaaataacacaaaaactcattctcaccagttaagtttcacagtatctgccttctggattaaaataatgcagtgcagaatttagcttatgtcacgtggggtcaagggaagaaaaaagaaataaccatatctggaaaatagcatggagaaacaggccctgtatgcccacagtttatttgttcagtcttgtagcaaggagtaagggaaacatgaaaataccttggtcataaattgtcatgtaaaagacaaagagaaactctggaatattatgaaactataaattacttctgctgaaagcgtagaatttgcagtatccccttaaccgaggtttcacctccccacttttgacagaataactcctgttctttggagaaaaacacatgaaataaatgtaaaacccgagagggaaatcatctaatatgtacaccacctgcctaataaaataagaataaatttggttttttggctaagtagatttgcttatgttttaacttagttagaggcacacgccatcaaaattacatatttattttcatttcaaaagcacaacacaaagggacaaaaaacaattttataatgtttaagtggttttgctttcaaaaacagacatcctatgatagaatttctatttacaaaataagacccaatcagttcttaggttagcatacaatcaagtctatttattaattgtgctaatgagatcctgaaacaccacagtttggcctccagctcggccctgggatctcagacctgtggtgctgagttacaggagtacacagatccgtttaccccagagattgccagcactttagtcaccaagctaatggcagcaggtaccaaacaatgacctctcaaaaataaacatatctgctcttttaaaactctttctcccaaatcctagaaggcagcaggcctcatgaagagctacctgcaaaatccttcctttgaagaaatacacaaatgagtcaatcccccgttgagggatttgctaaaaacaaaggtccaggaagccacataaaaatgatttgtgaggctccttgacgcctgacatttttttttaaaacgctttctatgctccatttcaaaaaacaatgcatctgcaggcaacttgactgctatttaaggcgaaatgctggtctcagatgtatatttgaggcatctattcaatctggagtttactatagccaaggcctaaaccataaaaatggagttggtaatgaaaacacggagaactttaactagagtcagtgccagattgccattctgtctcttccagcaccttctacttacgagaagttactgccaaatggagcactggcaagttgcagagtgagtcccccttcctatgggctgatgtgactctcaccctaatgggacgtggtagtgcctgggagctgctggttggtgcagttgtgctgggaagatatgaagctagaatttcagaggcccactctgcgggtatcgctttggctctattccatgtgttatattgaatggtagaagcagacatgtatttttcaatagtctgtattccatacagaagaaagaatggccagtgttagtccagtactatattttgattatggggaagaaaaattacaagaaacttaattcaacaagcattcactatgaataataataactatgatctttgagggcttacaacttagccttctgccaaggacttttcagacattgaattgtgtaatcctcttaatattcctaaagatatgactactatccttgttttataaatgaggaaactgaggccctgagagatttagtaatctgattcaggtcacacttttcctaagtggcagatctgggacttgagtccacatctagtcaaacaataaagcccttttcaatacactgtaacgcttttttggagttatcttgtatgtgaactactaaagatgctgtgaaatcaaaacatttgggtatgttaaaacgcattatgtctccctgaatgatgtactatatagtggtaggtaccagaactccattttgtagtgggaatgctaaaatatgaaaaggttatttagtgtaatatagcactttaaggaagatccgttgtcttgacctgaccctttagactatactgccgtaagaaagttataaaacattcagtatctgactcctcttcttctactaccatgtttgatctgacagtaaaagtttacaaaacccccttcgtcccagacaatgttaaataatggaaggggaaaattcctatttttcccccaaagttattcacagataagttggctaaaaattcaaaaaatgtatgagctctttttggaattaattcattgaaaagaaccattacagtatctatatcccttcccatctggaatttattttttaagacgctcgttgcttctcacaggttcaatgttacccatttcacaccatttaactattgaaagcacttgaaattccggaccataggagcagaaccagggtctttcctcgtgatgcaactaatgtgtcagacttgtaaaatagctcttagtggcgggcctccatttagagaaagacggaaactagctttaaatacttagagctttaatatctagtccattacactaaagcagggtcttgtaaagagtcaattatgggatacttctgatttgatccacatgcaagggaaatccgcttctttgcctttaaatccccgttgtaagtgtcttgtttaaataattagtgacactttttctttgatcaaattgattcatattgttattcttctatgttaatttaaaacttaatccacataaaactctaaagcagattttaatcttgaataaagaaagctttctcccaaagaatggagttttccagaaaacattttaatttttaaaacatcattagttgattgaaaataaatttatttttctgtaaggaaatatgagagtctatcacaagccaaaatcgtactgttatttttggtatgtagcgtgatgcttttcagacacacacacaaaatataaactatatgcttaatagcatgactaagcaactaagcaactgagacctctaaagacaatcaaatgtaatctcagtttatggtttgggggctaaaaagtttacatatatttgaaacatttgtcaaagggttaatatccctcatttaaactttatttagaatctaagaattgataaatagaaataaaagcaaaatgccaggttttacttatcaaattcaaactttaaaaaatcataatatctaatattggtcagggcactgggaaactggcactctcatgcactgccagtgggtattagatactagttctccgaagggcttttggaaagatatatcaaaagcctagaaaatgcacattacctctgatccagcaataacaattccagcaatttaggagtctagtctcaggaaacaatcatagtaagaatttagttatggagatatttcaacactgattctaacagtgaaatattgggaaaaaactaaaagtacctcaacaagggattggttatatacactgtacttacactcacaattatatccctcgaacctattgaacaaatgaaatatctatatcccttttaaaaggatggtgtacacaaatattctgttatgtatatttgaaatacatggtcaatgagttaatatccctaattcaaactttactcataatcaaatgtgctagggaaaatggtcataatatataatacttttttttttttttttttttgagacagagtcttgctctgtcgcccaggctggagtgcagtggcacaatctcggctcactgcaagctcagcctcctgggttcacgccattctcctgcctcagcctcccgagtagctgggactacaggcacccgccaccatgcccggctaattttttgtatttttagtagagacagggtttcactgtgttagccgggatggtctgggtctcctgacctcgtgatctgcccacctcggcctcccaaagtactgggattacaggcatgagccactgcgcctggcctatttttatttttttaaattttatttatttatttatttatttatttttgagatggagtcttgctttgccacccaggtagtggtgcgatcatggctcactgcaacctcttcctcccaggttcaagcgattctcctgcctcagcctcccgagtagctgggattacaggtgcccgccaccatgcccagctaatttttgcattttaagtagagatggggtttcaccatgttggccaggctggtcttgaactcatgacctcaagtgatccacccacctctgcctcccaaagtgctgggatattacacgcatgagccaccgctcctggccactatttttatttttaaaatgcaaagatgtggagaaaaattggtaggctatacagatactcctcgatttatgaacatcatagcttagccttatcctaccttaaacatgctcagaacattgacattagcctattgttgggcaaaatcatctaatacaaagcctatgttctaataaagtgctgaatatctcatgcaatttactgaatacagtactgaaagtgaaagctagagtgggtgtgttggttgttcactttccctgccgctgcccagcatcacgagagagtatcatactacatatccctatcctggggagaggtccaaattcaaaattcgaactatggtttctactgaatgggtattacttttgcaccatcgtaaaggtgaaatatcaaaagtccagctgttataagtcagggaccatctgtacatcaaaatgctaatagtggctatttctgggttacaggctaatgtttattttcatattttcatctctgaattttctaaattttctaaaataaacatgtattgctttcataataagggtataatttcaaacacttgtgcaattttgaattatttatacaagaaatatattccccaagttttaaaaaatatctaagtagggagcataaatattgaaagtacttccttcctatctctattcccaattccacaccctttccaagatgtgactactattaatagtttggtttatcctttctgataatttttctatatatcttgtatatatacgtacacgtaaatatatttcaattttgattttaaaatgttgttcataaataggattatattctgtgaatccatagaatcttagtctacatagtcagctccatgaatatttacattatttatctttttttttgctattataaacaatgctggagtaaacatcttcatatgtatgtcagtgtatacaggtgtaagtatttatctaggataaaacccaagaaacttaagtaacaggttgatgagagtgggcatttcaaattgcctttcaaaaagtcttttaacatcccctgcctgcatggcacatttattataattgatgagcccacactgacacatcattacgcctagagtccatagtttacattagtgttcactcctggtattgtgcgttctatgcatctggacaaacataaggacatgtatccaccattatagtaccatacagagtagtttccctgccctcaaattcccctgttctctacctatttgttcccccgtccccctcaactcctggcaaccacttatcgatttactctctccgtagttttgccttttctggaatgtcgtatgattaaaatcaatacaagcatacttcttttagttacacttcaccgatattgcgttttttagaaattgaaggtttgtggcaaccctgcatcataaaagtctgtcggcaccatttttccaacagcgtgtgctcgctttgtgtctctgggtcacattttggtaattctcacaatatttctaacttccgcattattattatatgataataatagttatggtgatctgtgatcagtgttctttgatgttactattgtaattgttttggggcaccaaaaccatgtccatttaatacagcaaatttaatcaataaatgttgtatgtgttctgattgctccactgaccagccattcccctgtctctctccttctcctcaggcaaaggaaaatttttgaagataattaaaagtgctactcctgaaaatgcatgaataataagaaagtgggaggctgaggcgggtggatcgcctgaggtcaagagttcgagaccagcctggcttttttggccaacgtggtgaaaccccatgtctactaaaaatacaaaaattagctgggcatggtggtgggggcctgtaatcccagctactcaagaggctgaggcaggagaattgcttgaaccagggaggcggaggttgcagtgagccgagatcacgccactgcactccaccctgggtgacagagtgagactccgtctcaaaaaaaaaaaaaaaaaaaaaaaattaaaagaaaaaagcaaagcacccttattgccgatatggagaaagttttaacggtctggacagaagatcaaaccagccacaacattcccttaagccaaagcctaatccagagcaaagccctaattctcttttatgaaggctgagggaggtgaagaagctgcacaagaaaagtttgaagctgtaagaggttggttcatgaagtttgaagagagaagtctctgtaacataaaagtgcaagtgaagcagcaagggctgatgtagaagctacagcaagttatctggcagtctagctgagatcattgatgaaagtggctacagtaaacaacagattttcaatgtagacaaaacagccttctatcagaagaagatgccacctaagactttcatggctagagaggagaagtcaatgcctgcactacagcttcacaggctgactctcttgttatgagctaatgttgctggtgatttttttttctttttttttttcagacggagtctcgctctgtcgccctggctggagtgcaatggcacaattggctcactgcaacctctgcctccgggttcaagccattctcctgcttcagcctcctgagtagctgggattacaggtgcccgccactatgcctggctaatttttgtatttttagtagagacagggtttcatgatgttagtcaggctggtctcgaactcctgacctcagatgatccacccacctcggcctcccaaagtgctgggattacaggcgtgagccaccgcgccctgcccgctggtgattttaaattgaggccaatgctcatttaccattctggaaatcctagggcccttaagaactgtgcttaatcgactctgcctgtgtactacagatggaataataaagcgcacatctatttacaacattgtttagtgaatttttttttttttttgagacagaatttcgttcttgttgcccaggctgcagtacagtggcaccatctcggctcactgcaacctccgcctcccgggttcaagcaattctcctgcctcagcctcccgagctgggattacaggcatgtgccaccacgcctggctaattttgcatttttagtagggatagggtttcgccatgttggccaagctggcctcaaactcctgacctcaggtgatccacccgccttggcctcccaaagtgctgggattacaggcatgcgccactgtgcctggcagaattttttttttaaataatttcaacttttattgtagatttgggggtacatacatgtgcaggtttgttacatgggtatattgcataacacaggtttggggtatgaatgatcccatcacccaggtagtgagcatagtacccaataggtagtttttcagccctttcgtctcaactctctcccccaccagtagtgtccagcgtctattgttcccatctttatatccatgtggacccagtgtttagcccccacttataaatgagaacatgtggtggtatttggttttctgttcctgcattaattcacttaggataatagcctccaactccatccatgttgatgtaaaggacctgatttcattcttttttatggctgcatagtattccatgatgtatatgtaccacattttctttatccagtccactgttaatgggcacctagactgattccacatctttgctattgtgaataggctgtgatgaaaatacaagtgcatgtgtctttttggtagaatgatttattttcctttggatattttcctttgcccagtaatgggattgctgggttgaatcatagttctgttttaagttctttgagaaatctccaagctgcttgccacagtggttgcactaacttacattcccaccaacagtgtataaatgttcccttttctttgtagccttgccagcatttgttatttttgactttttaataatagtcattctgactgctgtgagatggtatcttattgtgtttttgatttgcatttccctgatgattagtgatgttgagccttttctcatacgcttgttggctgcatgtatgtcttcttttgagaagtgtctgtcctttgctcacttgttaatggagctatttggttttttgctggttgaattgttttaagttccttacatattctggatattagacctttgttgaaagcatagtttgcaaatattttcttccattctgtaggttgtcttcttgctctgttgatagtttattttgctatgcaggagctctctagtttaattaggtcccacttgtcaatttttgttgtcattgcttttgaggacttagtcgtgaattctttggcaaggctgatgtctaaaatggtatttcctaggttttcttctaggatagagtttgaggtcttacacttatatctttaatccatcttgagttaatttttgtatatggtaaaaggtaggggtctagatttattcttctgcacatagctagccagttaccccagcaccatttattgactagggagtcctttccccattgcttatttttgacagctttatcaaagatatgatggttgtaggtgtgtgactatacactgggttctgtattctgattcattcatctatgtgtctatttttgcaccagtaccatgctgttttggttactatagttttacactatagtttgaagacaggtaatgtgatgcttttagctttgttctttttgcttaggatagcaaaaagtgttggttattcagtttcttttttagttccacgtgaagtttagaatagtttttttctaattctctgaaaaatgacataagtagtttaataggaatagagttgaatctgtggattgctttgggcagtatggccattttaacaatattgattcttctaatccatgagcataaaatgtttttctgtttgtttgtgtcatctttgatttctttcagcagtgttttgtagttcttcttgtagaaatctttcatctccttggttttatgtattcctgggtgtgtgtgtgtgtgtgtgtgtgtgcgcatgtgtgtgtgtgtctattgtaaatgggattgcattcttgatttggctctaagcttgactattgttggtgtatagaaatgctgctcatttttatacatggcttattgaatgttttaagcccacagttgagacctactgctcattaaaaaaattcctttcaaaatattactgctcattgacaattaacctagtcatcaagaactctgatagagatgtacaaggagattgttgttatttttatgcctcctaaaacaacatccattctatacttcatggatcaaggaataatttcaactttcaagtcattttttaagaagtaaattttgtaagtctagggctgctatagatagtgatttctgtgatggatctgagcacagtacattgaaaactttcgggaaaggacccacccttctagatgcaatcacatttgtggttcatgggaggaaataaaaatatcaatattaacaggagtttggaagaagttgatttcaaccctcactggatgacttgctgaagtcttggataattattagcatttttagcattaaagttttttgggttttttttttctgagacagagtcttgctctgtcacccaggctggagtgcagtggcttgatctcagctcactgcaacctctgcctcctgggctcaagcaattctcacgtctcagcctcccgagtggctgggaccacggataatttttgtagagacagggtttcgccatgttggacaggctggtctcaaactcctggcctcaaatgatctgcccacctccgtctcctaaactgctgggattataagcgcaagccactgcacctggccagcaaaaaaatatttttaattaaggtgtgtacattgttttttagacatagtgctattgcacacgtaagagactacagtacagtgcaaatgtaacttttatatgcattaagaaaccaaaacatttgtgtgacccactttattgtgatatttgttttattgcggtagtctggaactaaacccacaatctctctggggtatgtctatagtatgcagcctttacagactaggttttctcccttagtaatatgcatctaagtttcttccatgtctgttcatggcttaatagcttacttatttttagcactgaataatattttattgtatggatgtaccagtttgtttattcacctactgaaggacattttgattttccaagtttgggcactttgaataaaattgccataaatatctgtgtgtaggtttttgtgtgaacataaattttcaactaatttaggtaaataccaaggagcaattgctggattgcatggtaagcatttgcttaattttgtaagaaactgccaaagtgtctcccaaagtggctataccattttgcatttccactagcaatgaatgagaattcctattgcttcatccttgtcagtacttggtgctgtctgtgttctgggctttgtccattctaataattgcagtggtatctcattgctgttttaatttgcatttccccaattacatattatgtggagcgtctcttcatatgctcattttccatctgcatatctactttggggaggtgtctgttaaggtctttggttcttttttaaaaatttagccaggtgcagtggctcatgcttgtaatcccagcaatttgggaggacaaggcaggcagatcacctgaggtcaggagttcaagaccagcctggccaacatggtgaaatctcgtatctactaaagatacaaaaattagctgggcatgatggtgggtgcctgtaatctcagctacttgggaggttgaggcaggagaatcgcttgaacccggaaggcagaggttgtagtgagccaagatcacaccattgtactccatcctgggcgacaagagtgagactctgtctcaaagaaaaaaaaaactagttgcttttcttatttttgagctttaagagttcttcagttcttcgtataggttagaaaacagtactttatcagatacgtcttgtgcaactattttctcacagtctgtggcttgccttttttttttttttttttttttacagtgtccttcacagaataatctaactttaatgaagtccagcttatcagttctttctctcatggaccatgcttttggtgtatttatttatttatgagacggagtcttgctctgtcccccaggctggagtgcaggggcgagatctcggctcactgcaagctccacctccggggttctcgccattatcctggctcagcctctggagtagatgggactacaggcgcccgccaccacgcccagctaattttttgtatttttagtagagacggggtttcaccgtgttagccaggatggtctggatctcctgacctcgtgatccacccgtctcggcctcccagagtgctgggattacaggcgtgagccactgcgcccggcttatttatttatttatcgagacagggtctcactctgacgccaaagctggagttcagtggcatgatctcagctcactgcaacctgcgcctcccaggttcaagcgatcctcctgcctcagccttctgagtagctgggactacaggcatgtgccaccacacttggctaattgcttttgtattttttgtagacacggggttttactatgttcctcaggctggtctcaaactctcaaactcctgggctcaagcaatcaatcctcctacctcagactcatgcagtggtgtcatatttaaaatctttgccaaatcaaaggtcatcgaattttcccctatattatcttctaggagttttatagttttgtgttttacatttaggtctgtgataaagtttgagttaatttttgtgaagagtgaaaggcctatatctaaatgtatttttctgcatgtccagttgtaccaggaccatttgttgaaaagactgtcttttctccactgtattgtctttgttcctttgtcaaagatcagttgagtatatttatgtgggtctatttctaggctctctattctgttccattgatctgtttgtcttttctttcaccaaatactatcactaccatgtcttgattactatagctttgtagtaagtcttgaaattgcacggtggaagtcctctaactttgctcttcttcaatattgtgtttgctattctgggtcttttgcctgtccatataaactttagaatcagtttgtagaaatccacaaaataacttgctgggattttgattggaattgcattgaatctataggtcatgagggaagaactgacttcttgacaatattgatcttcctatccataaacatggaatctctctccatttatttagttatttgatttctttcattggagttttggaaatcatgtaaatattttgttaaatttatacttaagcaattcatttttggggggtgctaaataaaataaacaagtataattttaatttcaaattctacttttttattgctggtatatagagaagtgatcaacttttgtatgttaactttatatcctgcaaacttgctataattgcttattagtgttgggagcttttctttcagactttctacatagatgatcacatcatctgcaaacaaagacaattttatttcttccttcatggtttttatacctctcttatttccttttattgtcttattgtattaaataagacttctagtctgatgctaaaaagcagcagtgagaggggacatccttgccttgttcccagtcttagtgagaaagctttgaatttctcaccattaagtatgatattagctgtaggtttttgcagaggttctttattaaattgaagaagctcccctctgtttctaatttactgagagtttttatcattaatggacattacattttgtcaaacgctgttttgtgcatttattgatatgataaagtgatttttcttctttagccttcttttgatgtgatgaattacattaattgatttttaaatgatgaatcagctttgcatacctgagataaatctcacttggtaatggtgtagagttttttatacattcttggattcaatttgctaatattttgctcaagatttttatatctgtgttcatgaacaatattggtctgcagttttctttctttctaatgtctttgtctggcattgacattaggataatgcttttatcttctgaaagtaaatatggtagaattcacctatgaacccacttgggcttggtgctttctattttgtaaggtcattcattactaattcaatttatttaataggtataggccagagcatttcttcttaggtgacttttggcagattgtgtctttcaaggaattggtccattccatctaggttatcaaagttgtgggcagaaaatagtttatagtattcctatattatctttgtaatgtccatagggtctgtagtgatgtttcctctttcatttctgatattagtaatttgtgtcctttctcttttttcttgattagcttggccaggggcttatcaaagaaccagctttcggtttcattgatttttctctattgaattcctattttcaatttcattgatttctgttccagattttattatttcttttcttctacttacttcagatttaatttgctcttcttcttttaacttcctaaagtggaaacttagatgactgattttagatctttgttttctaatgtacacattcaatgttatagattttcccctaagcactggttttgccacatcccacaaattttgataagttgtgtttttatttttatttaattcaaaaatattttaaattttctcttgagatttcttctttgacatatatgttatttagaagtgtatagtttaatctccaagtattttggtattttccagctatctttctgttattgatttcttgtttaattctgttgaggtcttaaagcagacattgcatgatttctattcttttaaacaatgctttaattattgtatctttatagcaggttttggatatggtaaggtaattgctccctcattgttctttatcaagtagttctgttatggtcttattcagtttctttttagtaaataattgagaatcagcttgtcaagttccatggaaatacttatcaggattttgtttgagattgcattaaacttatgaataatttgaggagaactgtcatctttacaatattgagtcttccaatccaataacatggtatttaactccattgattcttcttttatagctttcactgaggttcagtagtttattttatgtagttcatacacatttcttgttaagttttttcctaggaatttatttatttcctgtaattgctgggataaaagacatctatcgatgtttctacactgatctttagttagttactttgcacattctcttattagttcttagagctgttgatttttctaattagcacatggtttgcaaacaatgacacttttgtctgtttccaatatttattattctcatttacttttcttatcacattgcatcggctttcagtataacgttaaacagtagttataaaggacatcctatctggttccagattttaaaggaaatgcttatatatttgattagatttcttaatagataaattttgtcaagttcaggaagtttacttttatctctaatttactaaaaatggttgtctgtttatttaataaggaatgaatgggtgctgagttttattaaatttttttaaaagtcggggccattgagattatctttttctctgttaattaaataatttatagactactaaatcacctttgcatttctgacatatatcctggtttgacataatgtatttatttaaaatatcactggacttgatttgtgaatatattatttaaatttttgctttttcataaatgacattggtctatatctaagtgtaggctgcccttgtctagatttggtttctgcctatgaggctgagataggaagttttagctcactgtgttctagagcattttatctattaaaagaaacaattattccttgagattttgtagattttgtagaggaagacttctcacttaacatatttttaaatatgttaagttgtttatcttatggaatagattttgttaagttacatttttctagaaagtcttccattttatttagattttaaaatttattggtatgtagataaactttaaatatatttatttgtgctttctttgttcttgatcagatttgcaagaactttgtatattttactgattgttttaacttcaattttttgtattattcattggttctactagtttgagttttgcattaatttctgccttcatcttgattaattcattactcctttggggggcttattttattgttttttcccctaattctttgagtcaaagtcttaattaactcatttgaatctttctatattctattaatactctaaaagtatcctctaaatatcactttgtttgcatccagtagattttggtatattgtgcttttcttgatttttatttccacatagtttgtaatttgatggaataacattaaagatgtttaatttttttctcgtagagagatttttggggaaaatatcctttattaattactaatcactaattttattgaattgtgattggaaattcatgtcacataagatttctgtttttctggtatttattaatatttcccttacaatttaatacatggctgaattttgagaatcttccatggatgtttgaagataaatgtattatgcttttcctgggtataatgttctatgtgtattgtttagatttgtttgtttgattgttagtttaaatccttatgtctttactttgtgtgtgtacatgatcatctgatttctcagagagagttgttagactcttacactttaattatggatttgtgaatttcttcttgtatttctgtcaattgttactgaataatgtatattttaaagctatgttcttgttcataaaagttcaaaattcttatttcttcttgatggattatatttttaccaaaatgaaaaatccttgtcccttttgtcgtttttcatcttttacactaaaactagtattttgtctgaaattaatattactatatctgcttccttattttaacatttatctgggatagatttttccatttcttcacttcaaacttttcttcatcattttatcttatatatgaatcttgtaaataacatatgacaagatttttttaaaacctaattggattttctgtcctttaattggaaaatttaacaggtttacatttattaagaataccggtatattttgacttaatcttgctacctcactttatgttttctatttactattgtttctttttttattgtcttctgttggatttatttatttcttctttttccctttatttattgttttggaaactatatattccattttcctaatggattcttttacattttacattaagctttctaatttttctctttttaaaatcatttgtgtatatatctaggcacctcttggccccaacacgaatcttagcaaacattcatcttctttcttgtacttttgtctttcttcttctacttcacacattgaagtcatctggtactttagttccaggttgttgttaactatttttcattatgcttgaatatcatcagacttattctaggttttacttctttgcttaccgtttgtttctgatatctcttatagtcctctgaattccttttttggcaggggttgggatggcttatgtcttttagtaattctctaaagagaaaatttgtgggtggtaaacttctaagtcttactgtgtctgcaaatgtcttaatttttgtctcactatgtaaatattaattaactaggaataatattttagttttaagataatattccctcattatattgagctattatttcatctcaatataattttggtatctagtcctagtaattagacatgaaatgccaatgtaaaatctacgcttttgtagatggtttttcctgtctttattcttggtattttgaggtaagcccacgatgcaggccctttccatctgccttcagacctgggaaattttcttctattatttctttgattatttcctcccttccatcggctatggtctctttcaggagttcttcaaaatatgtaatctgatagactttttcttgttttttgacattttatgacttttttgggagaaacaggcatataatcagttcaaaatcttaatctagtctttctatgcattattaaggaaattttaagataaatgtcaaattatacttttgaatgtgattgaatttgggctctggttatttttccaaataatatatttttaaaatccttgaatggattccctttagataactctatggaatttttcactccttcaaccaatatttatttagtgcctaatttttgcttggcattgttctaggttctaaggattcaaagttttttaaaaagatacaattttaaggtctgacacagagtttcccaaccttggtactacccatgtttgactggataattctttgttgtgggaggttgtcctggccatgagaagatgttcagcagcatctctggcctctacccaatagatgccagtagcaccaccaccaccccattgctgtgacaataaaaaatggatccagtcattgccaaatgtcctctgatgggcaaaattgcactgcccccagcacactctctgtcaccactgagaatcattggtttagcaggagaaatagctagtatactaccgggtctatggcagtggaagaatatatagaatgttggcacaaagaaggtaatgcctgaggttcaggaaatgttttacaatgcaaaagataacttggcctggatcttaaaggaagaattaggtactggtcaggtaaacaaggaataagggaagaaagaatagtaatattcaggagaaaaacagcatgcgaagacagaaaggttgaaacaatttgatgcatctgagaaactcttagtagttcagttcagtgtgtggttggaatacagatctgagggctatggtaaaaagggaagaaaacaatagagctggagaggtagttagggacaaggttataaaggaacaggcaggctatgctaggaaatttgtgctttgttcagcagtgatggaaaaccactggaagtgttaagcagggaaatggcattttaggaagacagttttataaatatgcaatgaatggtttaaaaagatatgaaactagaaataggaagactggatagaagaaaattataacaaccaagttaaggacccaaactagggcaatgggggcccgagagatggaaaatgggacatgcaatatataggaggtagaaatgataaaatttcctgattgttatatggagaataaagaattgggaggattaaggacaatgtcaaattttggtgaaaagaaagggtaaatggagctgttagcaaattgtgtttacaggtagaaaattcaaataaatatccctgggacaaaaacaaaaaacaaagaaaacaaaaaaaccctaagtatcttatagctctatagttctaaacacaatagacaagacataaattgatagtttttagaaaaacagaaccaacaccccccatctttcccaaaaaatcactgtttactttcatcacaacaaatttcaacatcttctctaaacattttctcatggtctttttatcccaaagctttaagagaatgctttatatatattttttcaaattatttcactgttaactgatttttgacacattatttcagctgttacaaaagactgtgaaattttaagccaagatcggaccatgaggactaaatttttttgtttattaatgacataaaaaatagacaattgtatccataaaatgacttaagttccataagcaaccataaacgccaaataattcaaggtttggagaattttttttttcagcatctttgctgaagaactatggtactgaggacctctactgttgagaatatgaatggcttcactgctaggattaaattttcagggaataaaaacatcaaccaggcataggcaatctacagtctgcccaaagtacagaaattattttcagaggcacacggatagttgtgtcactggaacctacgcagaaatgcgtatgaggtagaatttaggtctcctctcaccttctggacttctctacctccgtgtgcccagggtctagtgctgtcttctggcttgagtctgtgttgggcctgattactacaggtttttttttttgttgttgttcttactctgttcttttttcttttcttttcttctccttccttcctctttctttccctctctcgtttttctttctctcttcctcccttcattcttctttctttctttttccctccctccctctctccctgtctttctttctttttttttcttttttttgagacagagtctctctctgtcaccatgctggagtgcagtggtgcgatctcggctcactgcaacctccgcctcccaggttgaagcgattctcctgcttcagcctcccgagtagctgggactacagacgtgtatcaccatgccctagctaatttttttatttttagtagagacggggtttcaccatgttggccaagatggtctcgatctcttgacctcgtgatccacccgcctcggcctcccaaagtgctgggattacagacatgagccaccatgtctggtctttttttttttttttttttttttttttacggagtctctctctctcgccaggctggagtgcagtggcccaatcttgactcactgcagcctccacctcctgggttcaagcgattctcctgcctcaacctcctgagtagatgggactacaggcacccgccaccaagcccagctaatttttgtatttttagtacagacggggtttcaccatgttggcagggatggtcttgatctcctgacctcgtgatccacccacctcagcctcccaaagtgctgggattatagacgtaatctcaaatgccacaagatataggattggaagagatttcttttgtgtttatatttaatatctggctggccatggctgggtatgtagtgcacttgatctttttatttttttttatttttttgagacagagtctcgccctgtctcccaggctggagtgcagtggcgcgatctcggctcactgcaagctccgcctctcgggttcacgccattctcctgcctcagtctcccgagtagctgggactacagccggccgccaccatgcctggctattttgtatttttttagtagagagggggtttcactgtgttagccaggacggtcttgatctcctgacctcgtgatccgcccacctcggcctcccaaaatgctgagattacaggcgtgagccaccacgccaggccagtgcacttgatctttaagtgagatttaattccagtacttccatgacactcattattagtgtttgaattgacccaagcacctctctggtataccttggccagtaactgtcccacatgctaggatttgaatttaggtcctgctatttattagtttattaccaaggaacttgttcaagttacttgacctctcactcaattttctcctctgttcaaatgggagaaataacattttttaaaaaatgtttgatcaagttagatttgtgaaaacatgtaagacagagacggatacaaaatgaatgttcaatattcctaatgtcccttctctccctttcccttccctttataaaaaatcaattcagagtgagaaatatctgtgttgaaaaatacgcttaagggggatcctttatcaacaacatatttccaagccaaatgtgagtcaaaccaaattcatgtcttcatcagattgtgtttttaccacaagaaagtttctcaaattaggatttatgttgacaaaagaaattgggtgttagagggcttggtcgtacacaaagcaccaaagctgtaatcagctttgtataaaggattctatagaattacaaagagtttagtcaactcccacagtcatatgtgaattgtgaggtttggtccggggacaggtgaaggaaaggatcctatgaaagctggcaacaagagaaagcgaagccccaaatataaagaaggcctacatcatctctacactatccaatcacattcacaacatggcagcattgtgcatttgggcctccatacaaagaaaattcatcagctcctgtgcctcgccttccaggactcagagtgaggccatcctgtcacacgctgttttgttaaaaagatataccaaaccggccaggagcagtggctcacgcctataatcccagcactttgggaggctgaggcaagtggatcacttgaggtcaggatttcaagaccagcctggccaacatagtgaaaccccatctctactaaaaatataaaaattagccaggcccggtggtgggcacctgtaatccaagctactctggaggctgaggcaggagaattgcttgaaccccgggaggtggaggttgcagtgagccgagactgcactactgcactccagcctgggcgacagagagagactctgtctcagaaaaaaaaaaaaaaaaaaaaaaaaaggcaaaccatatgcagagacccatatgctatgatacaaatgcaagccggtacacataaatgtattttcccaccgtccagagattttgttgttgcaaaaaacaaaatcttggagtgaaatgtaaaagctaatggctcctattcactgtgaaaaatggagaggaaatgataatcgagttgaagaaatagcaggttagcaattgggagatcagagacccaaaatacctcccactgtgtatctgtgggaccgaggtcaagtcctctcctctaaatagcgtttcagtttccccaccagaatgctctaaagaacaatcctggcttgtgcttcaaggggaggagataacaagcataaaatactttgcaatcttccttaagacagtgttacctaaatcccagtcattactacactaatacactaagatgatagtacctgcaggaaggcaggcatcaccttgaacacagagagctgttaatcacctcaaatccctcaagtgtgtcaagtaaagggcaagggaaagatgcaaactgtagtactggtgtcaggatggttttgtgtgtgtgtgtgtttgtgtgtgtgtgtgtttgagacggagtctcgctctatcccctgtgtgtgtgtgtgtgtgtgtgtgtgtttgagatggggtctcactctatcccccaggctggagtgcagtggcgcaatctcggcttagtgcaacctctgcgtcctgggttcaagcaatcctcccacctcagcctcccaggtagctgggattagagacgcatgccaccacgcccggctaatgtttgtattttttgtagagacggagtttcatcatgttggcaagactggtctcgaactcccccaaacctcaagcgatccacctgccttggtctccccaagtgctgggattacaggtgtgatccactgcacccaaaatcagctcagagtgatttcgtataagccttgagccttcaccgtgaacattttgcttccaagaataaatgattctgaattccaagtaacctcattactgcgagatgagatggtcttgaccagtttaccactcttgaggctttaaatcttggcatcactgctgtgattcccacctaaaccgaagtgcatgtgcaggactgtggtgtcaccgtaaccagaaagaaagacgcttactttaaccaaggaacctacttccaacctgggattataaaatgcctacctaaatccaaactgcaacttttatcttagacctctcctccaactaatgcggtcagtgcagatcaaatgtttagattgataaatgcggcttactggtgtgagagactcactcattgacagagcccagaatccaaaggtgattagttgactaaagagggaagacgagcaccagacagccttgtttgtcattttgcacacttaatcgcataaatctcataacaccaactgcagctgcatggcaggaaattaaatactgacaaaaataaaaccaaagctcccaaatcagttcagacacctgtttcgcaagaatcagtgcgataagatcatctgtgggtggcaatttttttttctgtaacgtcacttgataactatttttctccctgttctttttttttttaacttaaaaacacagatagaaaaacatgtagacatccttaatagttgaatattgacacacatactttaggattcattttcataaaagtggctgctttttgtataatgtagatgaatgttatattccagattaaaagcagacccaattctaattgaaaacaaatagagtatcctctaactgtggttactaatttatacacaatatatttactatttcagaaagaaactggcttaggaatttcctttaactgtacccaaaaatgctaaaaatgacatatatttccttacacacacttgtccaatttgattcgaatcaaggcttccctctcaaaccatatattggtttttaaaatttttttaatttctatatcacttggactggacctacattgtttaaatgaatagtttgtaaggcagagtctaaccttttaaaaatcctagtatgtgagaatatcatttcgagattgttttatctaaatgaaaagtattaacttaaaaactataaaatttgctttgcttaaaagaaaaaaaaggtagccacagtcttgtaccatcatttgataactatttttctcctctgttctatttagttaaaaccacaggtagaaaaacatgtgcaaatcagttaaacatttgagaaaatgttagtgaaaaaggaaaggagaaaagaccctcttctgggaaaaacctactatttatgggtagtgctaattttaaaatgttttttaattttaaaataatttttaaatagaaaacttttcatcagatttgactttaagcaaaggaaaagagttgagtttcactttcacagtgcaactatacagaaaattccagagatgttcaaatgcatcaggcacctacaagagcaacctccaagcgggtgaaactcaggaaagctctgtggaggagggttttcgtggtttttggagcaccacaactgttttcaaaacataccaacgtatggagaataaagcattccaagcacaaaatgagcacccaacaagagctgcaaaagaatcttttacctaattaaaagcttaaatttacagaacttcagagcattgccgtttcagcttgactttgccaaaataatcaagcaggatgaagcaaaacaaatacaggaacaacaagcctaccactctggttttgatttgctgcccattacagtggagcggtttggcctgctcgggctagatgctttcaaacatcttccaaatgccctataatgacacctaattttacatttaactcttggaggaaaatgttgttttccttgtgatagtatttgttctatttgaacattatcaaactgtttgttctaatccgttaggaaaaaccataataaggctcatctagaggctgttcctagttaggaaggtgactgaaaagatttagatcttgagtctgtctttaaatcttctaaatgaaagatgatttacaattgagctacgaaaatgtgaacactctcaagtctggaaagtttcagtctgaatctagatattttgtaaatcaacgcaaagactctgtctcacaggaccaaattttacaaatatcaggctctatgctcaaatctcgttaataaattataaagggttcacatactatgttttaagttcagctagtttcagctgaggcactatcagtatttccttataatgtaccgagaaatgaataatagggcttgcatttagagatagaatagcataaagtgccagaaaattgtcacataatgatcacttttcattcagaaaaaaatatatttctaatagtttgataaattggaatagggagataaggtttcccaggctgctcaggtttagttacaaattaaggtcaatttttataaacagaagttttgaattatttaaaattttgaccagtttaggagtgtctgatttggggacctcatcactgcactccagcctgggtgacagagtgagactctgtctcaaaaaaacaaaacaggccgggcacggtggctcatgcctgtaatcccagctctgtaggaggctgtggcaggcagatcaccttcttgaagtcaggagttcgagaccagtctggccaacatggtgaaaccccatctctactaaaaatacaaaagttagctgggcgatgtggcatgcacctgtaatcccagctactcaggaggctgaggcaggagaattgcttgaagccgggaggcaaaggttgcagtgagccaagattatgccgctgcactccaacctgggtgacagatcgagactccatctcaaaataacaacaacaacaaaaccactttcacagccaccatttcatcaaatcttctcaatatgtatgaagtggatattattattatatcaagttaaatgctttggcttcccttttccgtactcagccaatgcccttgcccttgtccagagatctaatttccaggcaagaagcagtacaatgtggtggaaagaccttggttagaatcctagatttggatccagaatccaaatcactttaggcaagtttcttttcactggagatcattttcctcatctgtaagacaaaggaattagaccatgtatctttaagaattcattccagtttgaaattctctgaatcctccagaaaggaggaatactggatgacaaagcccacatgatcatattacccaggactctcattagacctctgggtaaatgttattaaactatccaactaactctgaatattcaaaacaagaactaaaggttaagaaactggaagatctgaaaaaataaaggttagtgagctacatagatgaaatcttccagaaagaaaaaattatgtggtaaaagttgtgtgcacggtgtaggtatgcataagttttactacggatagtgaaggcaaaggagaaaaaaagaatacaaatcaggaagaagacaatgacaagaacagatttgcaaaacggtgtcagaactgacccttctgaaaagtgaataaatacaattcctcaaaaatgagggtgacggttactcaaacttcttgtcctagaggcactagggtagtggctagaatatcaaaataggactcagaaggcagattctattacaacttaaactctgatatttattaagaatatggccgggcgcggtggctcacgcttgtaatcccagcactttgggaggccgaggcgggcagatcacgaggtcaggagatcgagaccatcctggctaacacggtgaaaccccgtctctactaaaaatacaaaaaattagctgggtgcggtggcgggcgcctgtagtcccagctactcgggaggctgaggcaggagaatggcgtgaacctgggaggcggagcttgcagtgagccgagattgcgccactgcactcccacctgggccacagagcgagactccgtctcaaaaaaaaaaaaaaaaaaaaaaaggaatatgtcgcagcttaagtcactttgcccgtccagatctcattatagtcatctgttaaggtgagactatctccgtttattttatctgtaaaaggaaggcataggactcaatgatctttaaggtcccttagagatcttatattttatgactcaacatggtgaaatgaaagcatttttcagtaaagttagctgagaatctaagaagtgccttaaaagttgacataataataatatccacttcatacatattgaaaagatttgatgaaatgatggctgtgaaagtggttttgtttttttgagacagggtctcactccatcacccaagctggagtgcactggagagatcacagctcatggcagcctcggcctcccaggctcaagcgatcctcccacctcagcctcccaagtagctgggactacaggcacgtgccaccatacctggctcctttttttacttttttagtaaagacagggttttgccatgttgcccaggctggtcttgaactcctgaactcaagaggtcagcccacctcagcctcccaaagtactgggattatatgcatgagccaccacgtctggctgaaagtgttttgtaagctataaaatgctatgccattgatggtagtagtagatattatttatcaacattttaagaaaatgaagagttaatgttgatgaaagtttcatcacaccataggagatggtcaacacatacttttttaataagtaaatggattcgaaggaacatgtccaattccacaatgagaaactgataaacaaatttgcagatatgaaggggggaagctcatatccacattgttggggaacatgggaaaatagaaagcccagttcaataacagagcaagagaatgtgtggaaaaatgcttcttcccctcagagaaaaatttctatttttgattctttggtttcaaaaaaaaaaacaaaaaacatttaagtgccaaccacgtgtaagactttatgttaatttctttttctttccttttctttttttttttttttttttttttttttgagacagggtctgtctctgtcacccaggctggagtgcagaggcacaatctcggctcactgaaacctccacctcccgggttcaagcgatcctcccacctcagccaccagagtagctgagaatactacaggcatgtgccaccacgtccagctaatttttgtatatttttggagagacagggtttcgccatgttgaccacgccgctggtcttgaactcctggcttcaagtgattcgccttcctggggcctcccaaaatgctgggattacaggtgtgagccactgtactcagcatttatgctgatttcttgagcatggggattaggtgttccaggaaaaagaagatgattcttgtcctcaagaagcttacaattaatttgagagaatcataaaaacatgctaaccatgacataatgtgacaagtatggttagtagacacagtactaggtcctgtagaaccgtgaaatagggggaagaattttgcttgggaagaatggaggatggagaatggagaagatttccggtaggagatcttttgtaagctgcaccttaaaaaatgaataagatttcattaagctcaaaaggcaagaaaagcctccaggaagaagactgaaagaaagggttcgagaatagaaatacaagtgattaccaaaatcccatagataaaaattgagtaggaaggtgaccgagcaatggttaacatcttgattgttggagaaatcaaacaatgtggccgggtgcgctggctcacgcctgtaatcccagcactttgggaggccgaggcgggtggatcaccagatcaggagatcgagaccatcctggctaacacggtgaaaccccatctccactaaaaatagaaaatattagccgggcgtggtggcgggagcctgtagtcccagctactcaggaggctgaggcaggagaatggtgcgaacctgggaggcggagcttgcagtgagccgagatcgcgccactgcactccagcctgggtgacagtgcgagactccatctcaaaaacaaaacaaaacaaaaacaacaatcacaatgtattttttaagagtgatcttcttggacagattgtttgtacaataactaattccaaaagtgtcagcatgcagacatgtgttttgtggggtattttacaaaggaaattaaaaagatacaaaactgatcctttcagagcttaaatttagactaatgtagtattagggacatcatagagcttttttaaaaaaaaaaaacagattttcattcttagtttgtagtcaaaatgggcttaaaggcaacattacctataactgccccaaaattatatggctaaatacttagatttagggcttggactttttaactcaaataacttttaagaacacatattgacttatcttttcatctttttccagggcattcttttagctcccttccagacagggggaatgtattttacccacgttcctgtcccatctgaccacttgctaatcagtctggttggaatacctctccaaacctatcctcgtcactagttaatcaccctaactagtcacttttgagtgctgcaatgtagggcataccatccttgccacattcccagatcctactggcttaggtccagatttggggactggaaattcaatcagaaccatgctttcctatggaatttgaccttatattatttttaacacatacagtccaacagaagcaaacagccatgaaaaggaacttcacatattaagcacacagcaagctgttaggtaaacatgccagattatgccaagtacatagctgctaaggacacaattatcctgcagttccctcatttagcatttttgctgttagaagatataagcccatccatctgagtaatgctaaaacaggtggtctgttctaaggacctttggagaagacggttctggaagggtgggaaagaacccttgggtctttttttcagtccctttacatttcccgtgttccacaaaggtcaaactacttttataaaaggaaattaaatgttacaaaccagcactaaaatgaaatcactctattttctcacctaacctccccacagtcaggacgtttggaactcatatctccctatttccgctaagctgtggttcccaatttaagactttaaaaaatatctctggctgtaattcgcatgctgtaattcttcagaagaggatgtaattctggaatttcttatttaaaaagtaatgaattaataagaaactggatgcttcaacttctaaatcacaatcaattttttcattggtttcttatactgattacagcattcatatatgtacacatgtaccttcagtatatgtgtgtgcttctattgttaaacccatgcgtattaaggaggctaccaggttatttataggtgccaatcctgaacgtcctcacttgcatgacaggtatattttgctttgtaacactttcctttggttccaactggaataaacccactttgtgtttgcttgtttgtttgtttgtttgtttgtttttgcggtgggaggagttgtttctctctccctctctctctttgagacaggtcttgcagtgttgcccaggctgaagtacaggggtgcaatgataagttactgcagcctcgttctcccagcctcaagtgagcctttctacctcagcctcctgagtagctgggaccacaggcacatgccaccatgcccagctgatgatttactttttgtaaaaatggggtctccctatgttgtccaggctgttcttgaacttctggggtcaaatgatcctcctgcctcggcttcccaaagtgctgagattacagttgtgagctaccatccccagccaataaacccgctttgattaaggcaaatatagtttcagacacaagcgatgtaagtgggaaggttttcgtgacaaaattcacctctagtgaggacacacagacaatatttgtttgtttgtttgtttgtttgttttgagacggagtcttgctctgtcacccaggctggagtgctgtggcacaatctcggctcactgcaacttccacctcccaggttcaagggattctcctgcctcagcctcctgagtagctgggattacaggtgcccaccaccacgcctggctaatttttgtgtttttagtagagacagggtttcatcacgttggccaggctggtctcgaactcttgacgtcacgatccgcccgcctcggcctcccaaagtgctgggattacaggcatgagccactgtgcctggccacaatatgtatggtaatatttgagaggcagcatagcatcatggttaggtttgtagaaaaattgtgcagagtcccgaataccacttgcctcaggtgcacaaagtttctcctattattaacattttgcacccagtgtgatacattgttacaactgatgaatcaatattgaccaattattatcaaaattcatagtttgcattagggctcactctttctgttgtacaattctctgggttttgacaaatgcgtagtgtcatgcatttaccattacagtatcacacacaatagattaactgccctaaacatcctctgtgttccatctgtgaaccccttcctccttccagcgaaaccaatgatctttttaccatcttacagttttgccttcccagatgtgatatagttagaatcatacagctggctgaatcatacattcagctggcttttttcacttagcaatacgcatttaagatacctccaagtcttttggtggcttgatagctctttttttttcttttttaacagagtttgttttttacagtagttttagtttcaccgtaagattgagtggaagatacgtatatctcctggttctttttcagtaattgctgaataatattcctctgtatggatgtaccagtttatccattcaccctttgaaagtcttgcttactttcaatttttggcacttatgaataatgctgctataaacattcagagcattgttgcgtgcacatgcaaaatacttagaagaatacttgtgctatagcagtactatgagccattaccttattttaaagatgaaaaaaggccgagcatggtggctcatgcctgtaatcccagcactttgggaggccaaggcgggtggatcacctgaggtcaggagttcaaaaccagcctggccaacatggtaaaaccccatctctactaaaatacaaaaattagctgggcatggtggtgggtgcctgtaatcctagctactcaggaggctgaggcaggaggagaattgcttgaacccgggaggcagaggttgcagtgagccaagattgcatcactgcactctagcccgggtgacagagtgagactccatctaaaaagaaagaaagaaaaaaaagatttaaaaaacagtttcaaagatttgcccaatggcactctgctaaaaagtagtaaagttgtaaacaggaaaatatacctactgaactatatatgtttacttaaaaagacctaccaatacatgcattctgttcagctccactgatgatacaaaaatgaagatatgtcctctatatatacatgcataatctcaatataatatgctgaatagagagtttttttggagacagagtctcactcttgttgcccaggctggagtgcaatggcacgatctcggctcactgcaacctccgccctcccagattcaagtgattctcctgcctcagcctcctgagtagctgggattacaggtgcccgccaccacgcccggctgattttttgtatttttagtagagacggggtttcatcatgttggccaggctggtctccaactcctgacctcaagtgatccacccgccttggcctcccaaagggctgggattacaggtgtgagccaccacgcctggtgggacttttaacttcaacctagaacctctagagaaaatgatgcctgaattggtcctaaagaatgaggaagaattatccaggcaaagatgggaagggccatgctggcagagggaacacaatgaggaaaaaagacatcaaaggtatgaaacagcatgttgtgtgtatgtaacagtcttttttaaaaaaatccaatattgctagagcatcaaattctatagcagaaggagagatgcagaagataagattgagcaagacatggggggtgggaggggaagacctcttacatgcatattaaagagcttggactttattcagttggtaatgaaaagccaccaagacttttgagcaggaagtgttaggcagattgtttccggggcagtgtggataacagaggtaagagaaggcaaggttagagacgggcaggatgcccagctgggaagcaaactagaatggacgtttgaattagcattagtagtagggatggtgaggtttgcccttaggctatgtctatagggcactgacaaaacctggtgaaaagtgaaactgttaaaaacagtttgcatggtattccatggtgcatatgtgcagcatgtccttcgcagggacatacgtgaagctggaagccatcattctcagcaaactaacacagaaacagaaaaccaaacaccacatgttctcactcataagtgagagttgaacaataagagtacatggacacagggaggggaacaacacacaccaagtcctgtcaggcagtggggggaaaggggagggagagcatcaagacaaatacctaaggcatgcaaggcttaaaacctagatgacgggtcaacaggtgcagcaaaccaccatggcacatgtatatgtatgtaacaaacctgcactttttgcacatgtgtcccagaacttaaagtaaaataaaaaaaatatatatatatacagtttgcaatgataatacacagtaatatatcaccaatttaatagtttttttaaaaaaataactttttcaattgtagacaatttacctggctataattttgacatcaaaaacatgtataatcctaatactatattaatagatgcaaatattaaatcaactgtaagctccttgaaggcagtaccttttcttatatttatgtaacacagtacatggcccagtcttgagtatgtaataggcatactataaaaacttgttgagtagtgaagcttaattattatgttaatatcttataagaagacatttatgcagccaaaaaacacatgaaaaaatgctcatcatcactggccatcagagaaatgcaaatcaaaaccacaatgagataccatctcacaccagttagaatggcaatcattaaaaagtcaggaaacagcaggtgctggagaggatgtggagaaataggaacactcttacactgttggtgggactgtaaactagttcaaccattgtggaagtcggtgtggcgattcctcagggatctagaactagaaataccatttgacccagccatcccattactgggtatatacccaaaggattataaatcatgctgctgtaaagacacatgcacacatatgtttattgcggcactattcacaatagcaaagacttggaaccaacccaaatgtccaacaatgatagactggattaagaaaatgtagcatatatacaccatggaatactatgcagccataaaaaaggatgagttcatgtcctttgtaggtacgtggatgaagctggaaaccatcattctcagcagactattgcaaggacaaaaaaccaaacaccacatgttctcactcataggtgggaattgaacaatgagaacacatggacacaggaaggggaacatcacacaccggggactgttgtggggtgggaggaggcgggagggatagcattaggagatatgcctaatgttaaatgacgagttaatgggtgcagcacaccaacatggcacatgtatacatatgtaacaaacctgcacgttgtgcacatgtaccctaaaacttaaagtataataataataaaattaaaaaaaatttaaacagttatatgttaaataaattacaaataaaagtgaaattgggaacatttacaaaaaaaagaaaaagtataattttgactataataaagcttaatcttagtgtatgatatagctaacagatgttagtaaatttatctaaacaggagaaattctaaaagcaaaacaattattctcacagtggcaaataattactttccaaattacttttatggaatttttttaaaaaacaaaaactaataaagatgtcaagaaatttccagaaactgaagctatacctttaagaaaagttgctgcaacatatctgggaaagaaaaccttttcagagacatgatcaaaggattaccgtgttcagtataaaaagcaacaggcacacctgctgaaatactagttttctattaatgtttacaaggtattagactctttagtatttttcttacagctcttctataggatgagaagtcgacaaaaagttatctctttgtgccttttgaaaattctacatctgtctagaggctgaaacttcttttgcgtctttcttttgttctgttgtacacactggtgaatttttatttaagtgactcactattgatgtgacttgtgaaaagttcagcatagttggcaattaaatgaaggcattttagaaaacattacaacttttgtgttaatgggtgtaacccaaaagatgggtctagtgaatattctcttttatgtattatgactccaccacattaaaaccagaggataaataaacactaaaaacacttttaagtacaaggtattatcaagcaaaaatcattgatcttgtacctaacatgctaacaatgatcaaacaatatcacttatgagtaagagtacagaatgagcaatactgcattctacataaattgtaaatcgcttgagctcattcaaaaaatattttcaatttgccttgaacttcttttcactggaaacaattaccactaggaactattttgtctatgcaaactaaaaatgaaaatgaagtgaaaacaagctgaaaagttccttaacaaacatctgtttttctatagatctgataggttggatattttgaaacattttaaagctaaagggaatttcaaacaccctagattaacattgaaattgacttctctacctggtttttaaaagtgttgatctctgagacaagaagccacatgctaattaaaccaggtttcatttcaattagaagttcaaagaagaaacacattttggaaggtattacaaagttacggttactaatctacctgagaactatctttaagaggtaactttgttttcttttaagtgtttcatgtgcatttttgttactcaaaagcaaacctatacctgagatgtctttaaaaaaaaaaaaaaaagacagggtctggctctgttgtccaggctggagtgcagggcgccatcaccgctcactgcagccttaaactcctgggctcaagccatcctcccgccccagcctcccaagtagctgggactacaagcacatgccaccataccccgttaattttttttttttttttggtagagatgggggtctcactatgttgcccaggctggtctcaaactcctaggctcaaccaatcttcctgtttgggactcccaaagagctaggaagacagggctgagccactgtgccaggcctttagatgtcttgatctgttggtgggaagcgttcctcaccaacctccacctatctccgttttttttacttccagactcaatacccacgacaaaaaaatgccaaaaagagatattacaaatgtgcaagtcattactacaaccactgaaaatagaatgtttctacaggttcagctttagctcatgtatctcctctgtgtttacctaaccaaccacacctatgtggacatagtgattcacagggaaaaataataacctgtatttaagcataaagatcaacaacagaaataccacccagggaaatactgttatgagtgaggtcatgaggtgcatttagcctgaaagatgcataaacgaattgctaacctaatggctcaggtgccagagaatactaattggagccagacctcaagtcaatctttgaggccttgtaattgacaacgtcgagcactaaaagtaggaacgtaggaaaggagaggatcagggacatgcgtcacgctcgaggccagaacaaatgtccagtctgcatcaaaagagaggttgcctttgtgaagtccacaggttatgaaaagtagctatacttggggggtgaatgggggtacctgaagcatatataaaactgtcaaacacctacgcttccccttgataaaattagtttcttaagcaaatattgttgaaggctaaggactggtctgagaatacaactgttgtaagttctgacctaatgatactaaatatctacagatttagtgtgtacatactaaatatgtttatgatcctgccaatactttttaatgctttgtgtcttatagcttaaattctataatcccggttgtaacagaaaaacatgcagaaggcattatgactatgtcacatatgaccttgattattagaattttcaactgctcaaataattaaacagggctgtactggagatggcaggacaatcaagggagggagatcaagttatgagacatttgtgaaagtcttttgatggcttacaattacataacaattttacaatatatttaaaatattgaagaaagaaagcaaaatacagtgagataggtatgatgtcttttatagaatttgtttgtttgtttgtttgagacagggtcttgctctgtcacccagtctggaatgcagtggtgcaatcacggcccactgcatcctcgacttcctgggctccagtgatcctcctacctcagcctcctgagtagccaggatcacaggaacgagccaccacacccggctaatttttgtattttttgtgaagacggaatttcactatgttgcccaggctggtctcaaactcctaacctcaggtgatcagcctgccttggtctcccaaagtgctggaattacaggcatgagccactgcactcagccaaaaattttaaaattatgtaaagcaatattacatattgtttataaattcaaatatgttataaatatataaaaataaacgggacagattcatacacaccaaatttgctgaagccagtataccaaaatgttaacatctgtaaaatccactcattggttgattgacatttgaattgtttccatcttttggctgttatgaataatgctgctatgaagttttgtgtacaattttttgtttgattacatattttcaattctcttgggtaggtacttaggagcggaattgctggatcacatggaaattctagaactttctgaggaactgccaaactgctttccccagcagctgcaccattttatattcccagaagcaatacacaagggttccaacttctccacaccctcactagcccttgtattttctgttttttaaaaattatacccatcccagtgggtgtgaagtggtacctccttgtggttttgctttgcatttccatagtaacaagtgatgctgagtatttttcatgtgcttattggctactgcctattcaagtcctttgcctattttttaattgggtttgttgttgttgttgctgcaaggtaagattttttaaaatatatattctgaatactagatccttatcagataaatgatttgcgaatatttcctttcattctttaggttgccttttcactttttttcttttttttctttctttttttctctctctctttttttcttttttttttttttttgttgttgttgctttgtgtgtgagagacaaggtcttgctctgttgctcaggctggaatgcagtggtgtgatcatggctcactgcagcctcaacctacctggctcaagtgatcctcccgcctcagcctcccaagtagctagaactgcaggcacgtgttaccatgacacccagctaatttatttcttgttttttgtagaaatgggggctccctatgttgcccaggctatggcctcccaaagtgttgggattacaagcatatgccaccgtgcccagccttttcactttcttaatactgtcctttgatgtacaaagttttttaacttcgataaagtccaatttatctattttttgtttgtttgttgcttgtgcttttggtatcatatctaagaatccattgctaaatccaaggtaataaagattgacacctaagttttcttctaagagttttatagttttagatcctacaattaggtctttgatcgattttgagtttgtttcaatatatggtgtgaggtagggacccaacttctccggcatatggatatccagttgtcgcagcaccatttattgcaaagattattctttccccattggaatggtcttggcacctttttcaaaagtccattgactatagacacatgggcttatttctgtactgtcaattttattacattgagctataatcctcatgccaccatgaataaggatgtacacactctgtacaacaaattgtaaatgctttcatagtgatactgggtcattactgttagtatcaattgtattgtgcagtaacaatgccacctcaaggtctaccaaaataaatgggttatttaacttcaaagcaaataatcccaaactggtatttttgattatttatgttttatgtggctatccttctcttgctaagagttgtatgttgccctacaatcagcatgcctgtcatacttgcaatctcatttttcccttcctaattcattatctttaatacctctgtgaattcagataagtgggttttattcattcaataagcactttgagtgtctactattttggcttatgaggaattgcaagtgactttcatacgggatggtgagtatgacagcactctcaattcaacaggtgtacacatacacagctcattgtaaaacaaaatgataaatatgctaataaaggtgggaatcatgtcatgggagtataaagaagagaacattcatttaatgcaaagagataggagaaggtttcatagaggatgtgacatttaaactaggccttgaaagattaattgaattttgtcagatcctgtcagattaagaaggataggaagtacattttagggaaacagaacataccatattcaggcaacagtaagtagtccagtgtcactacagtcatggtaaaaggtagtgggatgaacaggcgctgtggctcagcctataatcccagtactttgggaggcctaggcgggtggattgcttgagctcaggagttccagatcagcctggccaacatggtgaaaccctgtctctactaaaattacaaaaattagccgggcctggtggcacacacctgtaatcccagctactcgggaagctgaggcaggagaatcgcttgaacctgggaggcagaggttgcaatgagccaagatcacaccactgcactccagcctgggtgacagagcaagacttggtctcaaaaaataaaaaaaataaaaataaaaaggagagaaacagacagatgagcgcagggttaagagaacagccatgaacacagtactatgctaagaagtttgagctttattatgaaggcaactggaaggcagtaaagatttttgtttggaaaatgatgtgattagttctattttaggaaaaaactgaactggtagtggtgagactgaggacagagggagttgaaaggttaattctttttttctttttttgagacagggtctctctctgtcacccaggctggagtgcagtggtgtgatcacagatcactgcagcctcaacttcccaggctccagcaatcctcccactgcaatcctcccacctcagcctcccaagtagctgggatcacaggcacgcaccaccacgcctggctcatttttgtgttttttgtagagacggcgtttctacaatgttggccaggctggtctcgaactcctgggttcaagcgatctgcctgcctgggccttccaaagtgctgggattatagacatgagccacgcatccagctgggaggttgatttttaatcaatatgtgagatgatgaggacttggcaatgggaatagttttgtgatttataaaagtaaaccaccggagttagagtttgaggcactttctgatgggtaaagtgcataagaaagtcacagtacacagattttgagatgctcctcttgggggtcctataaggaaagaaaccattaaaagagcgcgggctttagagtcaccagggtctcaaccctgaccctgccgtttcttagttgcttaactatgagcaagttccttagcattgtaaagacatatcatagaacaggtacattgcaacttctgcctcctaacttcttgcaattctcctccctcatcctcccaagtagctggcattacaggtgtgcgccaccatcccccagctaatttttgtatttttagtagagatgggttttcaccatgttggccaggctgatctcgaactccggacctcaagtgatccacctgtttcagccttgcaaagtgctgggatttcaggtgtaagctactgcacccggccaaggtacattaatattaacatcacagggttaatgggaatcagtgactgagatgatatgaatagtattcaataaatgttagtttttgtattttttcccctcccagattcttcactatacttttggtggttgagggtgccgtataattgaccttgagatttagcattattataacagtttttaggttaattaaggggttgatgagaatggtgactctgatgcttccctttgaacttgacacaattcttttctaaattgtgcactttagtgtggcagctggttgacacttaaggtgcatgccatgctgtttttggtttctgctgcccctctgtttggaatgcccttcctccatcccttccaataggccaggttagctcaccaggctcaactgaagcctcatctccttcaggatgcttcttttctcctctaccccaggtaaggtctgccttctctgggtccccgtgttgttgtataatacaatgcactaaatgcagtgacagagtgccccatatttcaatgacctgtgtgtgtgctgggttccccttgtggatgacaaaggatcaagaactgtgtattatagatgatcttggtgtttcctccattcctatcctgggcctggtacatacaaaacactcgataagtatctgttgaataaagaaacaaacaaattttaaaaatcacccaccacccatttcaagtgcttacaagtcacatccactttcggtcttgaagctctcctgccctacttactagcctgtctttctcctcagagaagaagctggcatggctctgaaggaactgatcttatgaaaactcttgcgtttcagcctggctctaccatcatgagctgtgagatcttgggcaagtcactgattctctttgcccttgcttcctcagatgcaaagtgagaataattatggatgtgtagcaagagttaaatgaaataggacataaaagagtcttacatagtatctgtcacataatgagctttcatcatttattgatacgtatcattttcattataaatttaagttagaatatagctggaaatgaaaacattctcctgaaaaatttggatccgtcatgcaattaactcagattatttcaatcatccagggaactctgttaaattgcttttatttctactgttatccctagaaccagaatgaacttcttaataaaaataaaacaaagtaaaacaccccagcctcaaagtccttgccagtcataaataacttgaaagttatttaaatgaagatatattgcctctataatggggtgctgtctataaatcaggaagaaaaacaaacaaataaaaagcctattaatgtgaaatgctgacaaatctgtgttttcaagggccctacaattgagctttaataaaatacacattcatcgtgtctgtctcccaagccccacaaataagtctgatcacagcgactttagaaatggatgcctgcagagtcgaggcaagttttcactcccaaaaatgaaaacttctggctgttttttaaagtgagtgaactgtagtcctccgggcaccaaagagcttttatggctctttctcacacatcagccctgggaggctttggaaaggatgcattagtgtgatgctgccatctgcagccaggactttccatatgttttgataatctgaacaaatactgatcctaggcccggccagccagcacacgttttaaatggtctttcaagttgctttcctgagtagggacgtactcgttagtgccaaaagaatttttggcagacatttctcccggttaccaaaggaacccattttagtttcagttcaagagaaatttcatacagaagatgcttccacttgatatgagttttcctgaagttccatggcacacatttctagatggtattactacaggaactttttcaaaagaatgatgttcatgtacttggatgatgctacgaactcacttcagagggcagttgggtgaagctgtggcacagtcattcataggcaggtaattcagcccccggggtgctggcttcaaatgtcactcacaggattgccctctgaccactttgccttgggttttgccctttccctctgttctgacagaggcagaagaaaataagataacagcagagggcatcagtcttttttctagaaaattttttttttctggttgaacaattagcatccaaccaatacataaactgcatttataaaacacgcaacccttccagaaataaccaaccaatttcacaaaaatgaaacacatgtctaccatttccatctttaacttgtttccaagtttgttttctttcagcgaagcatttgatctcttctgtcccacactttttaaaaaatttttcttgtctcattatgagtcatcttatgttccgcaagctaagtttgctcctcctatatctcaattctcatcaaagaacaaaataataaaaatcaatgttcataatctccttaaaatatcatcatctgaattatcttatttataccttcatagcatctcagtgtattttacattgagtttgactagtttcccaaatgtgaataaaaataccacaggaaatgtataggttatattaaaaatattagtgtgttgatatccttcccagcaacagaacatacacaattacttgatgttatacaactactttcggtcatcgtaagccatataactaaaccactcttttctctcatttggcagatgagaaaaataagttatgtaagggttaagtgacttattcaaagtcatctcaagtaatctgtgcagacacttagagattcttattgttcagatctgtactgaggtccttgcaagaacattagtctcctctttttacctctctagtgagaggtttacttcaaatttttatctgtaaaatgggtatcaatttctcaaatggaatagtaggagaataatttgtgacaacccatttagctcctaagagatggactagagaagaaaaatgagatgtcaaattggaaagcttatttagtgttatggagaaaatctaaattaaaaatggtagctttatgtttttatagctttggtagtacatattactagaaagtcattcagtacagaagcaagtttttcagcttgtttataaaatagttaagaaaaaattggtagcaattttattgcaaagcaaaaggttaagcagaaaaatctagttagctcataatcaatcctttgaaatactcgggataaaatagaaatatcttaataattattacttattgctttgaatcatacctatgctttctcaagatataagcaggtttttttccttgccttgaagagaaaagacaattattatccttctgtcatcttcaggtatttttctctgggcatgatatttttaattatccattagaattatgtctatagagggaagcataaatttcaaataactctaaatacttaaaatacattcagaaacatataaacttttgcaagcatcttactcatctttcattgtattataaaaccaccaaacacacattttactattatttttgttatataaacaaaatatttccaagtaggatttggtagatggtagatttcaaattaaacaaaaactgtgcccataacatatatccaattgtttattaactctgaatggtttaaatttttacaatcaaacaaggtattgaatagaaaataaagggcctatacataataccagatccaaaaacagaaacaagcactagttacactgtccagatattttcattttatgtatttaacacatatctctagtaatggtggtagaaccctgaatatgctaaacaccactgaactgtataccttaaaaagagtgaattttatggtatatgaattatatctcaataaaacttattttattttatttatttatttattttttgagacagagtcttgctctgtcacccaggctggagtgcagtggcgtgatctcggctcactgtgagctccgcctcccgggttcaagtctcctgcctcagcctcccaagtagctgggactacaggtgcccgccaccacgcccggctaattttttgtatttttagtagagacagggtttcaccgtgttagccaggatggtcttgatctcctgaccttgtgatccacccgcctcggcctcccaaagtgctgggattacaggtgtgagccattgcacctggccgcaaaacttaaagaacacgtctagctaaatattctgtaggaaataatacataatttttttccttgctagcacagtattttagagtagatacaaaaatgaaataaacaaagtgttcgttgcagcccagataaagtgatgctatttgctcagagtaggatatcttttgtgctgtatttacaagcctcaaattctgatttcaaagatttgtgtgaaattcccactgaaaccagtgaccattacactacatagcttagggtataatttggcacattctgcagtatatttgtatttttaaaggattctttgttacaactttcatctgcttttgtttaactgacaaaaagatcaggaaaaggtcatgatatttctttaaagaaaagtctggataaaacatgaaagttaccccagtacagcaatacagatttgcactcactgaaagtttttggaaataaatattgtatgcactctccatttggattttgaaaggaggagtagttagaagattcattcttttctgaaaaaatggttctgatcgtatcaaagaatcttagagtcagaagcactttagtgataatctggttaaatccaatgccatccttgatgaagtaacagagacccgaagaggttaagtaatttacccaaggtcacacagcaagttagtgaaagagccagatcgagaatgcgtctcctaattccctgaccaaagcttttcatcctctcattccctaaacaactatcgtctggggaaaattaaaatttgttaggtgtcccccatcaaaaaaaattgtattcatcataatcccacatacagcaggtacttaagaagtatttttaaattatgaattatcttccatctatttttactgggtttttttacacaacagttttgcgagatattttgtaattaatctcataatgaagaaaattggacagagaggtgttaaggagagttatggaagagatcaaacagcagccacatctccttccaaattccattgtgcctcatgaaatctcaagagagtttcagaaatcagccatgtgattgagccatgaaatgaacaggatcgtgctctgttagagagtgtaagctgaaacaatcgtcctggaaaacgcacaatttctatcaagagcctttaaaatgttcttataaaataatctaataattctatctctggtagccaattatataaatgtaaaccaagatgcagagacacaagtttgcagagaagtgttcattgcagtagtactcatgataaagtgataaacatcaacaagggaatagctaacaataccatagtatattcatttgataattaccactgtaggctaataaaaggaaattaagaagaatttaacaccaaacattttttatgtgacaatgtgaagtttaaaaagcagaatataggattgtatatatggtatgttttttaaaaacgtaaaaacccatgcacagaaaaatatgttggttgtctttggggcataaaaatatgggtggtttttcttatattatgcatgtttttaatgaaaaaatatgtattgcttttatagtagaaaaatctctaataaatattattaaaaataataaatactgttaaaacaaacataatatgagctaattgatcaaaaacaaatccagaaaatataattagaatctaccattggaataaagtatgtaagggctttggcttccgatgccctaacattacatcacgttatccaatgccataatttctgatgttgttgccaagtgctttttttttttttacagaatcacacataattagtagctaactatatatatcgttctttgagagtctaaagaatatcattcactctagagcttgtaaatatttcattcaattgatttgcttgatcagaccacaccaattaaaagcaaactgcatatgtctcccaaactcagttcaggggaaggggctcctctagttgcctcctgtgaggtttcctaatttaagtcagtccctgttttactacacatggtgaagtcgtgttatctctttggactataccatcatctaaactcacacaaaagcacgaggggctgtaatccctcattccacaaaaccccaagttaaccaaagttgtcacacatagatctggaaagatggcaaactctttaaagataatagcaactgtctaaaaggataacaaaacattgttttgagcaaaacgaaacaaaacaaaaacaaaaagccaggtcctagtgaactattaagaggaaattttcatttaaagatgagactttgtgaagggagatttcaaaattcctgagtcccacctctagagaaatttccccctgttgcttatactttgaaataaaaaggccactagaagaaccctgtcttcttctgtcagcgtgattcacgttccagcatttgcaatgaagatgagcctttcctgactagatctcaggaagacaaccatgaaggcaaactgacaacctgtgcttctgctgtcagagatctgcacatcaatcaataagactccatatggcatctgttttcagtgatcatgtcacttaccatcaacatcacattaaatccttgcggtaaaaatgggttctttcccccatattcacaagcgagtgatctctgatttcatccccaggcctctcgcttggggaagagagcacagtgcaacagtgtctcctgccgcctgttagcgtggtgacacgcgtgcatgggaggggctctccctcctgaaaaggaatgaagacttaatcctccaccagacttgacttcattccagtgtgtactttctctacattcaaataaaatgggctttgaatttcacattgctcatttctaagtgtaagaatatcattatctctggttttagagctcttctattatttagcaacttctcatatccttttgatgtttcacatgttcactcccatactggcccactcatcactcctgccctcccctcaaaaaaagcaatacaagatagctagttaaacctggagtacacttatatcaacagaagagtccaaatttaaatgccagagagaaaatgactggtgtcaggatataacctcatggttttacaggttttggcatagtgttcagggggaagtcatgctggaggggtgccactgaacccctccagtacaagttggtcttttagtattatttcagatcctcgatggaagaaaaatgcatgtctgggagcaatcacactcaagcatacatcttcctgtcatgcaattttgtgaatccaaagtgataaaaagaagttgtgacttttgacattactgaataaatcccgaggtactgtttgaatcaatcaggttacttcttcctctgaaataaattcagtatgtttacactcttaccatatgtcaaaagaatgcatttggaaatctcatgaattagctcacttatttaaaaaaaaaaaaaaaaagcagggtagggagaactcatgtagaaaactgcatcatgtttgcccaccccctccacatttctggtcattctctaagatttgcccctggggaatgcctggcttttattgtctcttgtttggggaatatttgacaagcaagattgcacccatcttagatgctaacgaaatggcctttgagtgcagggatagttaatgttacgtatgtgttcagagttacctaaggaagagcaactccctcccctagtctcaaaccagctacagtgctgaggtcgtatggatgcaagatgaaatcatagtctgttaacgcctcccattacttaagaagcaaaatagcccattgctctaagattgatctggctttctacctctctactctgatctgtagcaattattgtttattttggcctgtaatcacatccaatcttgaattcttccctaattgttccagaagtacctctcttgcctctggaacaggactaacttatttaaggatatcttaaacttgccacagtccctccagcccagtgtaccctcattaaaatgacttgaaatttctctctttgtcttagaaatctcagtgacaacacacacattttaaaaagtgttgtaagaatcaattcattaatatttgtgcagcacttcagaaatttaaagccccaagcattgtagttggatagcaacttagtaagataattagccaaccacttctaacttgaaactgtgtaagtatggacatgttttacctctgagtattttattctttcttccttttattggcttaagcataatactacacattctgatgactcaatttgagtgaaagaaaaagaggcgtttttagtttgaataagaattaccttaccatttagcagcattattttctttcggtatacagaatgtttttcattttcatccacaatttttaatgccctgagcagaaagactattaaaggtaaacacctgaacttatcctctagtttaggaaggcatttgatcacgagttttgttttgcatttgaaccaggacactctttaacctgacaacccctcctagagtggaaagagactactattgatttttcttatacacagttaaactttccattatgtgtcctattaataattatatttgcttttgtggtgtgtactggctcctgacctctgagctcagaccattataatcttctctaaatacataacctttgagatccattccccaaagacctgctgggagagatttcctgccatttttctaacattccaggacccaagcatacagtgaaaatataaatttgttttaaagcaaaaattagaataaaataataattagaagccagctaaaattcataaaatgtttaaatgcatttactaatcattttttttctggcaagatgtggtgttaaagccataaataactcttagcctaaactgttttgaagacaagaaagcaacaaataagtgaaataataacttcaaatcaataatagaaaacaatagaaaaaatcatttgaaataaaggattattttttaaataaaaagttattaaatttcatttactttgctgagtactatcattaatattactcttaggggagagttcatttcatttttgcatcctcaatgcttaacaaaatgcctacaacaatgaaggcactcaataaatatttaacaaatgagtgagagaataaatgaatgaatggctaaatggccaacatttgcttaccactgatgttcagtttacagatgtatttgaaacaaatatctggaaggcaaacaaataatcagaaaccaaacatctttaacctggattccttgaaactaaccttagaattcatttgagaataaggatttgagagcaggctcagttgaagaagttattgtgcaagagagaaaaaggcagaatctcaggtatttggatgtctctaagtagatccttagagaggttaaagttggtggactttattgccaataatacttaactttttgttctgaataatttctaatattatttcacaaacttcattcaggtctatatttatgcaaataatatttacaggtaaaggatcatattatttttctgaagtgtatttaatttttaaaataatagccacaggggaagctgatcttgctgagagagaacacatttggacttcttattgggatcagggtcaagaatatgcccagaagtgtgttcattgagggcaatacagaaaatattggcatatgttatccatttgggaacaactatacgtatctgcattgacatcgagcaatttgttagacccagaggcaagattctaaatgatgtactacaaacaaggcaaaaataagaaaacggtttaaaaagcacatcattagattcagaatacatatactacacccagctagttcaaacagaaaacacaccaccttgtggaatgaaagataaatgctttactatgttctgccacttatgaatgatgtcatcactgtgattacatgaagaagaaacttcttagctccagatggtcaccattccctgtctctggtagccctggtattcataagtaagtataatttttgttgaattcaattgtataaaaacacactgccttttttcactgatatgagtggatgagcacactgttttattactctctcagccttcattaatggtttttctatagaatttattgttttagtatagtaatcactagctttgcctagataataagaataggcttttaaactttttttagagagagacaggctcttgctctgttgcccaggctggagtgcagtgacatgttcacagctcattgcaaccttgaactcctgggctcaagcgatcctcctgcctaagcctcccaaacagctgggagtacaggcacgtgctaccagtccccatctccaacaatggggaatacatttcaacatgagatttggaagggacaaacatccaaaccatatcacccagataatttttttatttttattttttgtaacaatggggtctcgctgtgttgcccaggctgctcttgaactcctggcctcaagtgatcctcatgcctcggcctcccaaagtgctgggattataggcttgagccactgtgcatggcccagaatagacttttagaaacctcttttctattagtttccaagaggggtcagagatttttttttttatgtttattaaactttatggcattcaaacaaagacactgtttttacttcctacatgtgtgatgttaggtaccaactaattaatgtggaaagaaaagagtcgtaattcctgtctgttaatgttcatatactaaatacataactcaagcctaactattcccaagatactatagagtttagaaaccatgtggttcaacaccttcatttttaaaattaggaaattgaggcctagaaaggttaagcaaatcatctaaaattacactatcagtaaatggttaagcccagatcccaggccttctacatagcctagtgcattttctaccgtatgacacaatattgcttagaagttgagtgaattttacatgaacttgccaaacagtaaaattcattatgtttagcaactatgctacttactcaaaagctaccaatccctcattatttttatatttcacatcttaaaaatgatgctgaagtttcactctgatgaaaataaagctattttatccacttcctaaatgtgatatttaaaaaacatgcattttactttgagatttgctttgttgtatacatatttttaaaactaagataatggaaacacttctgatttttccattagctataaaagcaatgtatttgcttcaagatgagaaaacaatgtatgtatttaatctgttgcacataagaattctgccagacacttgactggtccacattacatgagtttgatgacagctatcttgcaatttctaattgagggagctttaagtaatgtgctaaagccatgttcagcgtgtgtagcaatgaagaagcccagatactagagagaaattgttcactggagctgttaatagaacccaaattccagtttgtaaggctgccagctgcaacccacttgtgataaaccatatgaaaaggaacagatgaacagatgaatctgatacaaatgatttatatgagaacgcagaaatctgctattgaaagttcacactagctgatttaaaacaaaaacaacaaatacatctgtctatcctttttgcactattacattaaaataagaacaggcaacctaagcaaaaacttgtcagtatcctaaaaatatgtaacgttgagcacatttattaataacttccttcttttgaaagttttttaaatggaattagaataccatttgtatcgtttcctttatttaaaaatgggtgcaaaattcagaaaaagcatttattgtaataattcatagatggcaaacaaaatgttctatattcctagatgagtcttataagaaaatattaggccaggtgtggcggctcacgcctttaatcccagcactttgggaggccgaggcaggcagatcacctgaggtctggagttcaagaccagcctgaccaatatggagaaaccccatctctactaataatacaaaattagctgggcattgtggtgcatgcctgtaatcccagctacttgggaggctgaggcaggagaattgcttgaacccaggaggaagaagttgcggtgagccaagatcacgccattgcactccagcttgggcaacaagagtgaaactccatttcaaaaaaaaaaaaagaaagaaaaaagaaaatattaattcaagcacactaggtttctcttttttttaaagtacatatttgtcagcgaggaaaagaaatgatcatatcaagttactaaagttgacttggactaatctatgttttcatttaactcatactttttttttttaagctgtggacaatttaaagcaagaattttcaatctatggattttgacccatttattgggttctgactagaattttaaaaattgaaatagatataacggcaaaggtacatttgacacagtgaagatagcaactttgggtcttaagatcaaatgtatttcttaatgtgaatcatggttaaaagttcaaaaaacgatgatttagagtaaaacaagtataaaaatcattgctagttttcttcaacattttgtgcatgtttctcttcttgggtttctttcttgataatccttagcccttttataactaattatcacatcctggaatttattttccacacttaaagctttacagatgtaaggaagaaatgtgtagactaacagacaacgaagaaatatgtggccaaatctccctagaaatcaatttatttttagtaaatcgctaggagtcaagacatctaaatatcttttctataattgtcataagaccttgtacaagtcctgttctgattatttccctggtgtatttggtgagaataattattcctgctactaaatcactttgcagaaaccttggaaaattagtattagtagactaatcatattgtaagctgctctgaccaaaatatcggataaatacatggataaaaagaggcctgctaacataccaatttgaggctcctaataattctcctctttgcatgttttctttatttttatttttactttttttttttttttgaaacaaggtcttgctctgtcactcaggctggagcgcagtggtacaatcaaagctcactgcagccttgacctcccagcctcaagcaatcctcccatctcagcctcccaagtagctggtactacaggtgcatgccaccacccccgtccaatttttatattttttgtagagatggggttttgccatgttgcccaggcttgtctcaaactcctgggctcaactgatcctcccacctaggcctctcaaagagctgggattagaggtatgagccaccacacctggacgttttctttctaattatttcttatatcctttgaaatatttatcttaggtaagttttttttcatgtgtttaccctcctcattacaatataagaggatcttcgagaatagaggatggcttataaaattctatattatttttcgggcccagaaaagatctctatgagcagaggtgactcaagagatgcttataatactaattaaataaatcatgatgaatggcaagggatagacaaagaattaaaattaatgatgagctagaaacagactctactgaccttaaaataaactctatgaagtccaacgcacaaggagatgaggttaaagcatgctaacttgtaaacaggtagaaaaatggattcacagattttcatggcacaagactttactcatttatttagctggatgcttccctatcactgggcactaaagactcttgtgtcatagtctttttgctactattaagccagaaaacagagataatgtgccagcctacctacacaagacgaatcatatttctctccaagaacctcaacaagggcacctagttaaaggtggtaactgaatttggttccatctacataatggcataatcaagacagagaaatgataaaaatattatgacagctgatgcattccctagagactgacagagtccagtagcaaggtccagatccacactggagtctgtacttgaacaagatacagatatcagatttagtaactagaaatattccatcgaccctcatccccaccccacccttccccataacagactcaattatcaagtggcaagaaaaattctccatagggaagcttggtgccttccttcaagaacgtgcctgccattctacaagaagtaaaaatcatggaaaattagtttccacggggaagatcatctgagaaggatgggcagtaacaacttagggggcaatgaagttagaaggttggcatagctcttcaaggaatgtcaagaccatggccagaaaatgctcaacattatagtaaaaagttgagggaaatgtacccaacagaaaactttgatgctcattttgaagaaggtaaagctgccagaagactgagacactgctgaaaaaatgggcacaaaaagaattacagtggtagagttgggatctaaaaatgtaccatttttgcatatgagagtagccttgttccacttcattacttaatttgagtgaagtggaaagaacatgggctttggaatcatgtagaccatgagttctcagtctagctcttttaattgagagatctatgataatgagtatcatcaacctttcttagctttgtgttctaaaatgaaaagtaacacctgcatattaagtgcttagcttagcataatttctagcacattgtgggggatctaagtgagatctattattgctgcttttaatagatttatttctgcagttctgttcttgcccacgatttcccttgtgaccattaatacatatttcgaggcttctgacaagagcgtgaaggcaccatctgtgccatgaaccttggactcactcattaacttcagtgaacagagccaacccaatctcacagtggtgggtaccctggagaactatcttagttggcaaaggattatctacatttcataacattttgttggaggtagttgaagtaggtgggctaaagtaactttgttttgtggtgacctgtggtcaaattatgatgatcaataatttgcatattgttgtaagtattcacaacaatgaagatgataagtaacaattacttctaatttatggtctctactatattatgcttttgctgaagcttgaagaaagctcatatgtacatagacggtgtgtctaaaagaaacacgatttttaaaaaatgtctgactgtatacatcaaatgagcaatacctcctacaaaggagctcccttgggaagctatacaaacattgttaacaatcctgcattagatcaaaacacttttggaacttctttattggaattgccttatgacctagtttatgagccatatagaaaactcagtctcattaatttatagtcacacataattaatttttcacctctggtggagttacccagcttgatcacccattttggctctgaatgattttgctgcttccaaaataaaatccaatctcaaagtgtgagtatttgccactatctagagtgtttaggagaacatatcacatgttatgaaggcaattccaaaaagaactccagaatttcagattctggaataacatatctcatggcagtgagtttgctgagggcaactctcctctgcacagcaagttgtatttaatagtatatttgattttaaaactattcatccaacaaacaattattgagggctagctattgtcaatttgttctttcattcatttgcttaacaattatttactgagtccctattactctataggaactgggctaggaacccagcagtgaataggaaagacatggccactattcttgcagagacttcatccaattaagaagacaaatactaaacagcaaagagaggcgtaatgagaacatatttcagagagacctaagctagtctagggattagggtaaactttcctgaggaaatgattttgaagccgagatttgaaagatgactaggaatgttccaggtagagggaacagcatgtgtaaacgcttgagggcaagggagtgtgatgttgcaggaactgaaagacgttcagtatgaccagagcatttaggggaatagcagaaaactgtcagaggccagaccatacaaggcctaataagccacatgaagagttcagactatttcagttgctcatacactaaagaagggatatgcaactctggttgcagaatggatcggacagaagagagactggaggtagagagacggtttagtaggttattaggaaaatctgggagaggatgatggcagtagagacacagagaggtgcatgaatctgagaaatgctcaggaggcagtagcaataggacttgaagatttactgggtgccagagattttaaaggatagggaagagctaaggatgagtatcgagtagctggtttgggaatgaagggtatgatggtgactttcactgagctggggacactggagaaggagctctagtcatccggtagaggagagatgatgagtatacttctggctatcctgtgattgaggtgccgggagagtatccaaggaaagacggtaagtaggtggctggatatccaaatctgtgtcttaggacaaagatgggactgaaactatttgaggatcatcagcaagagaaatgaatctgatcacctatgttgagtgtgcagagtgaaaagaacacaaggccttggaaagacccctgagatgcactaatatttaagaactgggtagaagaaaagatgaccacaaaggaaactgaagaataagccagggaagaaggtagatccggagagtacggcacttggagaccaaaaaaagagagcatttcttttcttttctttttccagcaagaagtcataactttatttatgatagaaacagtacaaatttcaaaccaagctgcagttactcctttgagacaccaaaaaaagttgctttcagatggttacactgttaattccataatcgcatttacaatatcattactgttgttcttcagagctcggactgcctttgctctcgacacatttgcttgtgacatgaccaatttcacgtctttaacttctacacctgtttcatcgacctcttcctcttcactctcctcttgtacagttggagtctgtgtgttttcttgaatgtttccgacagcttcaccttgaactctgaatttctccgcagctgctagttgtgcttgctgagataaatcttggatcttggcttccccaaaaactatgtaggcatccgaagcagggctcttgtagacgtccagttttgtgatgacaaagaggatattcttagatttccagatagtgactctagtaactcctgtaacctgtagaagacccagtttggacatagccttccgtgccctcttttcactccgactctgttttgctttaccgactggttcttcatcaatttcagctgctgccaccagccaggctttttgtgtggtggtctgggtggaatcctgttcttcaatccctggtactgattcaccactatcagatgctgttccagaccctgtctcagcctgggactgcggcaactcctgctctgtagcagggacggtttctgtggcttcgcccggcattttgtgcagggaacgcggaagcaagatggcggcagaaagagcgcgagcgagagcgtgacccacgcttgttgcagcgggaagcaaaaagagagcatttaaaaagacatttgtcagcagtgctacactgccatgaggtcaagttggaatggaaaaggatctattggatttagagactgtaagttacgcggtctgagtggtgcggtgtgagtggcacttgggaattggttaatggtcagttccttgaaaaaatgactaaattggggaatcattttttaaaatttacattatttaacatgctgttttaactgaaaacatatcactgtacttttatttgccaatcttttgataggagccgtaaacctttctttgagtattatctgtttattggaattcagcctcggttttctcacataaatcatatctataaaggtattgtctatcattccctgttttagtttatttaaaatagaccaagaactcaaaggtgctcatgaagcaatctgaacgcagaatcctagatatgtatggtttccctcgatcttttcttgctcccccaatgaatggaaaattgtaaatgtttccaaaccattcaatttaatttgcacagaaacaactattttattttttctatttatatttcatataacagttatataatgagtttacgtaataatcagttaaattacataattatagtaataagaatacccagcataaataggttaaataaacacaactgattcttggtaagcctataactgtatagagaaaacaaaaaatccatagaaaagaaaaccaaaaaacaaaaatccgcgtatgtactaggcagtagcacgttagctatagagtgtgccgttggcttccaccaatatgtttcacgaaggcaacagagagtatcagtcaatttgcattatgttggctaaatatacgttaagagagtttttgctttagttacaggggatgactcagaaggcagttagattgcagtgggctgagaagtaggaattgaagaaatggaaagattggattagatcagagtactcttataagaagtttaactgtgcgggaggagacagtgcagtagctgaagacataattatagttggcggataggtaaacacatattcttcctaagaagagacctgagcatgtttaaattctaaaaggagtagttaaatacaaatgaaagagggaagttgatcagtcaaggttctgaggagccaggaatgaaatccatggcacaagtagaacgactaatcttgaatagcaggaaaggcatccttttcattgtaataggaggaaagaagaaaaatatggatttgggtgcaagcagatttttaggtttggtagcacgatgtcaaaggagttcccatctggtaacatttatttttttttttttctaagaggctagaggagctgtctgctgagagtgaggggaaggcaagagagttaaaggtttatgtatgatggaaaagatttggaataggtgctgcatagaaggaagaaaatgatcactaaagaagcacaatagggtagtaattcagtattgaggtcctagctgagataggcaaatactgtgctatatgctgggttgagcaggttaaatgggaggaacatgcaaagataggtaagacacagtttctgttcatcaaatgagaaagagagacatataaacaaaccacttaaaaagaacagaagatataaattgtggcatattgtgaaaattagtaaactaggttgcacacaaccacattaataaatcttagaaaacttaatattggccgggcgtggtggctcacgcctgtaatcccagcactttgggaggccaaggcaagaggatcacaaggtcaggaatttgagaccagcctgaccaacgtggtgaaaccccacctctactaaaaaaatacaaaaattagccgagtgtggtggcatgcctgtaatcccagctactcaagaggctaaggcaggataattgcttgaacccgggaggtagaggttgaagtgagccgagatcacgccactgcaccccagcctgggcgacagagcaagactctgtctcgaaaaaaaaaaagagagaaagaaaaagtgagaatgattatcataaaagtcagatcatgattacctctaggagaaaagagaggagtgtgatcagaaagggacataaagaggacttttggggtgctagtgatgttctagtttttgacctggataatggtgtatttagttgcagctcaatcagggaagaagaacctctttgggtcataggataagggatttattataggaattagaccttacacgactgtgggaggagctggggaagtaacgtctcaagaggaagttggaggaccagtggagtcaccaactgatccagctgagaaaccaagcgcatccagctgccaaaatgagactgcacagattcctttggctgccgaaggagtctgtgggaagctgttgcttctttgggtctgcagccaaacatctggtcatgagcctgggaccgctgttggggaggagagttgcgtgtggcacagggaagagcaaggacacctggaccctgtgagacctctgcgtctctctgtatccacacccaccacagcaacttgcagagagaagggctgctgcttcacctctgtctcccagatctcacacaggctgcttttttggccatgcacagaaggggactctgggaaacacagttcccaggttaatcaatttgaaataaaatgatccagcgcaggtggttaaatgagtttgactttgtaattatccatgaaaatgtgcatttacagttctgacattattataatttataaaaagactttcagttaatcaatcagtaaaagaacaggcatggcatttcaggggccatgtatgatatgttcccatagtgttactagagtatgtttttaaaaagtgctatgaagctaaagagacagctctgcctgggggcatcaggaaagttttcatagaaaaggagacatttcaacatagtaataaaaatagctaccatttattgaccacttactatgtatcagacattataatatgctcgtacttcatataatttttacaacaatcctattagctagacattatacttccaatttttcagataaagaaactgaggtccagataaataaattaacttgcccaatctaacaagaaacagatcagaaatttgaaatacctctagtttactccaaccacgcggagcactacttccatttgagtctctttttttttttttttgagacagaatctcactctgtcacccaggctggagtgcggtggtgccattatgactcactgcagccttgacttctcaggcttaagcaatcctctcacctcagcctctcaagcagctaggactaccagcccttgccaccatgcccaattaatgttttgtattttgtttttgtagagatggggtcccactgtgttacccaggctggtcttgaactcctgggctcaagcgatcctcccgctttggcctcctaaagtgctggggttacaagcatgagccactgggcctggccaggctttttaaaataccatcttttcttacccagtcttccatttgagtcttcacaggtaataatatacctggcaggcagaaggaacagcatgagcaaagaattggcaacatgaatgagtgtggtttgcttgcggaagattaagaaggttgatgaatgtgtgtgtaggagatggtgaaaaaggtgaaagataagctataaaatttattgaagattttttatgccatgataaagtgtttccaacttaccctctagtcaaaaagaagtcactggaaattaataagtaaagaaacagcactaacagattgttttcctggcagtgattatttaatagccatctatacctttgtgtctgcgagtactttttacctggacttttctttattcttttttttttttctttttgagacagcgtctcactctgttacccaggctgcagtacagtggactgatcttggcccacggcagcctcaatctcctaggctcaagcaatcctcctgccccagcctcctgagaagctgggactacaggcacaagccaccatgcatggctaattttttttttttttttttttttagtagctaggaggtctcactttgctgtccagactggtctcaaactcccgagctcaagtgatcctcttgacttggcttcccaaagtgctgggattacaggcgtgagctactatgcccagcctgactcttctttattctttacatagaactttctatcacatgatttgttttgattctcacaattagcctatgaagaatgcagaataggtattattatctccattatatgaacttcaaaactgaggctcagtaaggttaaataatttgtccaatgtcacttggctaagtgacaaactttggaagagaacccacatttccctgactccctgttttctcttcttcctaccccctgttgcctaacttgacctgggcaaatgtcaaagtaaagaaaacaaaacgaatcaaaatccctgtgcgttttccagtgagctgtagccaagccgagtgaattttctgtctcttgaattctaggtgctgagaactgattggcatcatcatcttttgagaaattaaactttagtcataaaatttctatttgaactaaaattatatgactcagatatcttttgatttaaacctaatgacagcaaattgcttcatagtgggaatacagtaattctggataggcatgaggtttgtattttaaaatgaaacgcagtttttgaattgcaatgaacaagagaatgtaattagtcccaattgccaaatcagaaattctgccaggaatttcaagaaaggaaaaaaagaatggaatcatgttcaacatcaatgccagggaaagaatgcttccagaggctcgaggactctccatgggaaatcagttccctccagttccttaaatctccacagccgtacctttcatcaacactgagcatttcctcgattttaaaattcctggtttggtattctgttttcctttattaaaactcctgtcattgctctaaaatccccacctccgtttataaagtctgaatgtatgaaggtcgtgaggattttgttttccaatggtatccgatttttcctttaacgtaaccagtgaggaggaatagaataagggctggactggggcggctggcatccgaagtgcttgcttgtgagcttttctttatcgcttgtttgtttcctggatgtctgtctaaggagatgccagagtctgtgtcctgataacttactgggtctgtaaagtgactgctgatgagaagcttccccaccaccccaccatgattacactgaaattcagaattctaccagaagacaattttctcagttcatcacccttccaaggacattacataggtctcactttctcagagtgagcaacagcaaagcaacatagaaagaaggcacatcaggcttccatcccttccaatttatattactttgtttctcaactggcttttaagctattgcaagtatgtattaatatcgtctctctttgcaaaactgcttaggtctgaagacttgaaaacaaaaacataggaatatatatatttcttccaaagcaaaagatacatatgttttcttctcaagcaataaaatattggggataggtgtcaaagcatcacatgattctagtgtcttattaaaattggtatttttctagatcccaggagttctatgaatagacagtagcatttctcttcattctcaatgccagctatgtctacctggaagaagagatatacacttaaagctggtggcaaaggctactgaattggtttataggagaattccactttgattattttgtttagactttttttgaaaatattttataatctgttaagattcaacaacatcagggaaaaaaagatctcaaaagcgctatgctttactcaatttcagataattatgttaaaaattgtttagaactacaatcagaggaaggttctaactaatttttaacaaaataaagtccaacaagtagaattccatagaactggctcattggcatttagcatatgttaagagacagaattgttttatttgaaattgtcatatttcaccatcctcaacattaggtgaattttttttaaagtttcagtgatcccaaatgaatttctgattttcagtagaaaattgctaaaccttcatgttgtctagaaaatgtctctaatttgaaattaaagattttactaaaaataaagaaataataaaaaaaaataggtttttttttttatttttttacctaagctttctctctttcattattcttacttggcttgaaagatgctgctttatgcccagccaaaaatatgaaagattcaaatacaaagcatttaagtactgagcatattgcagtatgtgatgctggcctcaccatcctattggctcctatccacaagaattcaaaatggaaaatgtacctaatgacggtttatgcataacttctgggaaatctctttagatttaattttttagaatttaaccctattcgtcatttcatataagtggtcccaaagagatctccataagtggccagctttaatttgtatgcctcaggggttcacaggactgtaaatggaaatgaagggctggccctggtctcaaaatgacagcttgcttgcttacaggcaggatatggtagttcaaaattagccacaattatcagagtcatgcgttctacctcctgcttatttagcaacctgagtccctcagtctaaacctgaaaggttattctaactgcatctgatcaaatatattagctgaattagatttaatccattgcccaacaccagctccttccatagcattagacaaatggtctaagtgtcttttcttccctacctggataattagagattattctcttgggttctgtgatgaaatactaaactcctgcttttgttgcctctacccaagggcttagggctttttcctgtgctcgtggctggggaaagtagccctttctttctcttgtacttcccttgtgtctacagcaacacacccttaaatacttatcttgtttgaatgggaaaaaaatcctgtactacttgttgagatttatacgtaaaaaataatataaggccacagttacaggtaggtaaagtggctccataatctagctttttgtagtacagagaataaacacagagataccctgaaacaagatcttgtttcagggtatctctattcggccacctggcttacttctccaatcagtctaatctagatagttttctgatcagttttgagaaggagataatattagtctaaccccttttacagatgagaaagaatttatgagttaggcttttgtgtctgacttatgctcttccctctatagttatatattaaaatcctattaaaataatttaaagtgagttaatatatgtaaagcattcagagcagtacctgtacctggtacatgatactatataaacatttgctcttattttgagtttgtttgtttgttttaagaaactgggtctccctgtgttgcccaggctggtcttgaactcctggcttcaagcaatcctcctgccttggcctcccattctaactcctttgtgaagtcttccctgttctcatctggccactcctctctctgtataatcaggtgctttttggacttgttttccatcaacttacactgtatttaattgcttctattgctgtctccctcactagacagtaagctatttgaaggcaagaaccatgactgttctttgtattgtcttcctcttcagtgccaatcatattactttcaggcattacatcctttaaaaagtgttcattggtttagttgcactgatgatcttcaaaaccggtgggaagttattcaccagtgtaggctttgctcttagacctgcctacaaatactaagagacgttaaattagtttctctatggtgtaaattggggttgtgataaaattaagcaagtggcacggtcaaatggcagggaccagaaaaagggtaattgcaaaacagtaatcaaaaattgcacaaacaatgggattaatttagattggaactcactaaagcagcaggcagactgagcctcaaaattagggacaaggatctatactaggtaagggaatagggcaagctgaagcatggttcagaccccatccacagatagctgcaatcttaagaaggtatctgaaatggcttctaagtgttgcattgacaggtgactgtgggatcggagatcaaaagatcacagtctcttaactaggacggataagtctttccacattcgttttgtccccaacatgtttgttaaaagatctcagcttattagagtagttcccatttatccaggctcatcttcacaaatgtaccttccagagctgtgtccagataatagtgctatgtcttcaaagaggatcacagatttaatcatcacttaattagagaaccaattccaattttctaaatactacaggattttccacgttgaatttgttctctggaactcctaatggctgggcttttgaccagagtacgaatagcattcacccttaatgctcacgaagtggaacattagatgcccagctctctagatgttgtttggttgcagatggcaggtccttaagtctaaaagttatccctctcaatggtgtacccctatgcaatagcacatgcttctgacctcaaattccacagtactgcttacttggatcagagaaggaagaaaaggaagggagagagggaggacattgtgtaggaaggaaagtttaataatgagtttggtggggcagacaacagaaaatgctgtctagacttagaggtcgctgagaggctgaatttaatagttttgataataggagaactaaagaagatgtctttcagtctttaagagagttaaagagggctctaagtgcagaaggttagaagtacttggctgccaacccgttagtatgcacttgggactatactttatcttgtcccaaaattgatttttcatttgttgaagggtgtgccccccaacaattgaattgttttcagctagaaagtctgcaaagagctcaggtccttgagtaaagatgttttttatgtttctatcatttggactcttaactgttaaagagggttaaccagatatttgtgtttgtaaagtccaagaactctattgtctgagaaagggagtcatcctagacttccccctctgtggtgggcatctgatgtttctttggctatctgaaattcaatcttcctccctaacatcaccctaacatttggggggtgaggattttctttactaaattttgaatattataaatcgagataccttgtccttgctctatgaaagctgatggggctctcagatgcaattatatcctccttccataagatctgtaactcttattgtcttgattatcaaaagccaaccatatggcttaaactcagctagctgggagtgccttttctgggacttctctttagttctcctattatcaaagcaattgacttcagcttcccagtgacctcttaagtctagacggcattttcctgttttctgccccaccaaactcaatattaaacttctttccttcctacacaaggtccttcctccctcccactcgagtcacaagtgcagtgagacaggaaaaatcagtaggacctctttcattccagtggcagtagcccagtgaaaatgtcaattagctcctactgacttggcccctgtcatttctaagcctagttctccacccttttgatcaatttttttagttgtccaatatccttatttttaaaattccctttttgtttaagccagatttgatttttattattagcaaccaaagaactctaattcaatatcccttttcccacacattttcctcttcactcagtcctgtttattttaattccagaacagatcttgactctattttatacagctactttgacatcacctctaagccaagcttttttttttttttttttttttctgagacaagtctgtcacccaggctggagtgcagtggcgtgatcatagctcactgcagcctccaactcctgggcttaagcgatcttcccacctcaacctcacgagtagctgggaccataggcatgcgtcaccaaacccgactagttttttgtttcttgttttgttttgttttgttttagatatgggatctcactatgttgtccaagctggtcttaaactcctgggctcaagcagtcctcctgcctcagcttctcaaagtgctggattacaacaggcgtgagccactgcacctggccaagcttttttttgataggcaatcttttcttacccagaccactgcaagagcattcatgcttccactattgtcatcctcaaatctaatccattttccatattgcaagcacatcgatcttttaaaattcaaatctaatcatgatattcttcagtctaaaactcttgcttcccactgctcttagaagaaaataaaaaatccttaagaaggcctgtaacatgtttcgcaatctggccctggtgacccctccagccttgttttactatattctccccgccggctcactgagctccagcaactctggcctccttttcatttctctctttttttttttttttttttgagatggagtctcactctgtcgcccaggctggagtgcagtggcgcgatctcggctccccgcaacctccacctcctgggttcaagtgattctcctgcctcagcctcctgagtagctgggattacaggtgcatgtcaccacgcctggctaatttttgtatttttagtagagacggagtttcaccatgttggtcaggttggtctcgaactcctgaccttgtgatccatctgcctcggcctcccaaagtgctggcattacaggcctcagccaccgtgcccggcccttttcatttcttgaacacactaagctttttcctatctcaggggcctcaaaaatacagctccttccacccaggctacttctaccctgccaattatctgcctgcctgtctactcttcccgtctcacctaaagtgtcactaagggatgcccttttggcctggcacagtggctaatgcctgtaatctcagcactttggaaggctgaggtgggcaaatcacttgaggtcaagagttcgagaccagcctggccaacatggcaaaaccccatctctactaaaaatacaaaaattagctgggtgtggtggtgggcactgtagtcccagttacctggggggctgaggcagaagaatcacttgaacccaggaggtagaagttgcagtgagccaagatcgagccactgcattccagcctgggcgacagagcgagactccatctcaaaagaaaaaaaaaaaaagagaggccttttcttatctcctaatctaaacactactcttttccttcagaatagttataatttttacatacctatttttaaaattattcagataatgtctatccgtgtacatgacaaggtacagtcaatgtcccaatgcttgttagcttcaagagaatgggaatcacgtctgctttgctcaccactccatactgagtggattgctagcacccagtagtgtgcctgacttataaaagtcctttaagaagcatctcaattcagatggctgaatgaatggatgggagtcatcacatcataatttcttctcctaccctcaccattacttcctatactaaatcaattactcaatcagcaaatctttcattcagtctctaaagtacgcctctcttatcattgctacagtttagttcagactcttatcatttctcccctgggcctttgcaataacttcctaactagtcctcttgtccccagtcttgtccttctctcacctttcacactgcagctggagtgatctcccgaaatcacaaatctgatcgtatcgcctctttacttacagtgctttggtagcttctcatcatctgcagaatgaaggccaaattcctcatacaaagccctaagtgacttggttctctatatatctctagcttctttcccctactactctctacttttaacttgtgctctctttcttttcctttgcagttcgcttggcctacgacactggtgacactgttcttcacctcaccaactctaacatcccacagtgccccgtgtcctagcacagtttattatgttgtgttgaactttatctgtttatgtgtctgcctccatcattacaatgaaagttccttgaggacatgaactatgtgttattcatatttctattatccttgtagggcctttttcaacctgcaagttgcaatctagtcgttggtcattaaatcaaattagtgggttatggctagtattagtttttaaaaattatgtggaagagaagagaaagtgtcagactataccacatatagtaagggtaatctgtgtgtgtgtgtgtgtgcgcgcgcacgcgcacgtgtgtgtgtgtgtgtgtgtgtgtgtgtgaaaaactgtttttctttttttttttttaggatggagtcttgctctgttgcccaggctgaagtgcagtggtgcgatctcagctcactgcaacctctgcctcccaggttcaagctattctcctgcttcatccttccgagtagttgggattacagacatgcgccaccatgttcggctaattttgtatttttagtagagacagggtttcaccatgttggtcaggctgatctcaaacttctgacctcaagtgatccacccatctcagcctcccaaagtgctgggattacaggtgtgagccaccgtgtctggcctgaaacttttttgtatgcacatacatatataaaatatgtataaataagcatgtgaactagttccctatgtacaatgtatttcttgccataagattatagtaaaaatttattttctgaagaacattattctaatatctagaatatagaaggagctaaataactacccatcttaaatctttttggaatgaagtagaggggaaaacaaatgtgtctgaataaacctaacctcagtgagctcatgatttctcctgcttatctgacttcttactcttcaatgcccaaattatttccattcatcaagaagacattaaaaatcttaaaaatttatacctttaataacagagcttcaaaatacatgaagcaaaacctgataaaactgaaaagagaaataaacaaacccacaattatataagatatttcaaaacccctctctcaataaccgatgtgacacgttgacagaaaagcagaaaaggcactcaagactgaaataatgtcaaccaacttggacagtccaactaataacagcaggataaatactcttctcaagtgctcatgaaacatttaccaagagagaccatattctggcccataaaacaagtctcaataaattttaaatgatttaagtcatacaaggtaagttttctgaccacagtgtaatttaattagaagtcagtaatagaaaaaggtatttaaaaatgcctaggtacttggaaattaagcaacattgttctaaataaccaatgaatcaaagaagaaatcacaaaggaaattagaaattattttgactagagagaaatttttaggactaatagcctatattaggaaagaagaaaggtctcaaattattgacttcagctcataccttaagaaactggaagagtaagagcagattaaatgcaaaggaagaagaagacaggaaacaataagagaatagaaatcaataaaatgaaagagagtaatgaagaaaatccataaaactaaaagcttgtactttatgaaaatcaatatgattaacctgtagccactctaatcaagaaaataaaagacacaaattgccaaaatcaggaataaaagagaatatattactaaagatcctacagacattggaagaataataagggaatattatgagcaattttatgcccataaatttgacagcttaaattaagtgaaaaaatcccttgaaagactcaaactataaaagctcattcaagaagaaacagataatctgaatagccctatatctatctacaaaaccgaagctgttaaaaataatttcataagaaaactccactgcaaatactacttaacatttaaggaagaaataattcaattatatacatactccttcaggacctagaatggtcaatgcaatttttataaagaagaacaccatcctggctaacaaggtgaaaccccgtctctactaaaaatacaaaaaattagccgggcgcggtggcgggcgcctgtagtcccagctactcgggaggctgaggcaggagaatggcgtgaacccgggaagcggagcttgcagtgagccgagattgcgccactgcagtccgcagtccggcctgggcgacagagcgagactccgtctcaaaaaaaaaaaaaaaaaaaaaaaaaaaagaagaacaaagttggaggattaacactatctgatttcaagacttaaaaagctataatagtcaagatagtgtggtaactatagaaaagaaagtggaacagaatatggagtcagaaatagacccacacatatatggacaaccttttttttttcttgagacagggtctcactctgcagccttgaccctcctgagctcaggtaattgtcccacctcagcctaccaagtagctgggactacaggcacataccaccatacctggctaactttttgtattttttgtagagacagactttcaccatgttgctcaggctggtctcaaactcctaggctcaagcaatgctcccacctcatcctcccaaagtgctgggattaaaggcatgagccaccatgcctagcctggacatcttattcttgacaaaggcacaaaaccaaaccagtggagaaaagatactaatttcaataaatgttgctggaataattggattcaaaaaaaaataaaattggactcatacttcatatcacatgcaaaaattaccccaaagtgcatcatagactttaaattataagacttctagaagaaaatacaggagaaaaatatctgtaacctagagtgaagcaaaaatgtcttagatatgataccaaaagtatgatccatattgacaaatttgattcatcaaacttaaaattttctgttcttcaaaagccattgttaatagaatgaaaggtcacagaccggaagaaaatatgtgcaaggcatatatctgataaagtacttgaatccagaatatataaagcactcttaaaactcagcaacaaaccaacaaaccagttttttaaatgagcacaagatttcaacagacccttcaccaaataagatctatggatgatctataaacacatgaaaagatgctcaatatcatagtcattagagaaatgcaaattaaaatcacaataaaatgttactacatacccactagaatggctaaaatcaaaaagactgtacataccaagcgtcaacaaaaatgtggaggaacttaaacttttatatctttgctgacaggaatgtaaaatggtacaatcactttggaaaacagtttgacagtttctaaaagggtcaaacatacacctaccatatgattcagccatttcactccaggtatttaccaaagggaaatgaaaagatccatccatacaaagatttgtacgtgatcgttcatagcagctttatttgttgtaacaaataactggaaattacccaagtgtccgtgaacatgtggataaataaacaaattttgcatatccatacaatggaatagtactgagcaataaaagaaagtaaactattgttatgtgcaacaacatggatgaaatttcaaaataattatgctgagtgaaagaagccagacaaaaaagaatacatactgtatgactgtatgactccattcatacaaaatcctagaatatgcaaactaatctatggtgacagaaagctgacccgtggttgtttggggacctaggggtaaggggttgcagaaaaagaggtgggagggggacctacgaagaggcatgagacaactttttgagatgatgaatggcctcatgggttacaaatatgtcaaaacttgtcagattatatagtttaaatatgtacaatttaatgcatttagttatatatcaggccgggtgcggtggctcatgcctgtaatcccagcactttgggaggccaaggtgggcagatcacttgaggccaggagttcaagaccagcctggccaaatggtgaaaccccatctctactaaaaatacaaaaattagccaggcatggtggtgcgtacctatagtcccagctactcaggaggctgaggcagtagaatcgcttgaacccaggagatggaggttgcagtgagctgagatcacaccactacactccggcctgggcgacagagcaagactccatctcaaaaaaaattttttttaaattatttatcaattacaatgaatttaaaaataaatggaacaaaactattgaagcactagaagaaaataaaagatggctgggcgcagtggctcaggcctataatcccagcactttgggaggccgaggcttgtggatcacaaggtcaggagatctagaccatcctggctaacatggtgaaaccccatctctactaaaaatataaaaacaaattagctgagtgtggtggcaggcacctgtagtctcagctactcgggaggctgaggcaggagaatggcatgaacccgggaggcagagcttgcagtgagccgagatcgcgccactgcactccagcctgggtgacagtgcaagactccttgtccaaaaaaaaaaaaaaaaaaagaatataaaagatattatttcatatttttgggtgaagacaacctttctttgcactcactaaagctggaaactcagtaaaaaggctaatataattcaccacataattgaccacaaatttaccacataacataaactaagttaaaagataaacttcaaggccagaactttgagaggccaaggcgggcagatcacttgaggtcaggagatcgagaccagcctggccaacatgatgagaccccgtctctactaaaaatacaaaagttagccaggggtggtggtgtgcgcatctgtaatcccagctactctggaggctgaggcaggagaatcacttgaacccaggaggcggaggttgcagtgagctgagatcgcaccactgaactccagcctgggagacagagtgagactctgtctcaaaaaaaaaaaaaaaaaagaataaacttcaacatatgatacacaaaagactaataccttcactatataaagggctcttacaaattaatttttaaaagatgaatacttaaatagaaaaatagggaaaaggcatacatttcctggtaattcacaaatgaagaaaattacaattgtcaataaatgtataagatgtgttactccattagtaatagaagtttttttgttttgttttgtttaggttttgagacggagtcttgctgtatcacccccccaggctggagtgcagtggcacgatctcaactcactgcaacctctaccctctgggttcaagcgattctcctgcctcagcctcctaagtagctgggactacaggtgctcgccaccacgcccggttaatttttgttatttttagtagagatggggtctcaccatgttggccaggctggtctcaaattcctaacctcaggtgatccacccacctcggcctcccaaagtgctgggattacaggcgtgagccaccacgcccagcataagatttttaaattataacaataaaatagaatttgtattttatctaactggcaaattttggaaacattatccacagagcaactgaaaatgtggagtactcttgcacactgttggtagcagtggaaatttgcatactgattggtattactctcacagcaatttggcaagatacataaaattataaaatatctcaacacttaaatccaataatttgaatttttaggaatttactccaaaaaaatcaccattttgtttataatcactccaaattggaaacaactgaaatgttcatccacagagagtctcactaaagaaattgtggtttccctctatgttgtttcactatgaccaaaataccatggtcatcattaaaaattacgaacagctatattattgacctggaaagatatctattaaatgaaaaaaaaggtggtttgcaaagtactatgcataaatataactaaatttaaaaagtagtttgtaaaaaatatcctggaaggatatacagcagagtgttattaataacaatggttttctccgggtatggtggctcacgcctataatcccagcactttgggaggccaaggagggtggatcacctgagcttaggagttcgagaccggcctggccaacatggcgaaaccccatctctactaaaaattagctgtgcgtggtctggccacctgtaatcccagctactcaggaggctgaggcaggagaatcgcttgaacccaggaggaggaggttgcagtaagcccagatctcactccactgcactccagcctgggcgacagaaagagactacgtctcaaaaaaaaaaaaaaaaaagtccgtatagtaaaagatccgcattttagaaaaaaaaaaaatctgatctaaaattattcaataagaattttatggccaggcatgatggctcaaaactgtaatcccaacactttgggaggccaaggcgggtcgatcacctgaggtcaggagttcgagaatagcctgaccaacatggtgaaaccctgtctctactaaaaatacaaaaattagccaggcgtggtggcgggtgcatataatcccagctacttgggaggctgaggcaggagaattgcttgaactcgggagaaggaggatgcagtgagccgagatcgcaccactgcactccagcctgggcaacaagagtgaaacttcatctcaaaaaaaaaagaattttgtaataaaattcttaataaaactcgtttctacctgggtttttaaatgttctaatttgttcattaaagcttttagaaagtgctgctcctattgaaaagtcaggaataattttcctgaatggtgatttttttcccgctttctaggcagtggttcctaaccaaagagttttgagcatgaaaagtacaagagcttgtataaccagctctgagtaaaatacatctatcatcacttcgtgagatgacttcccactaaacaaacacctgggctaagaaaattaatggataaaccaatattgcaagcctgggctacattcatatgtattggattagtttatattcacatcattatttcttgttgaaaagtattccacttaaatagtttaaaaatttgcttccacgagatattgtcatatttaaacatacactgaacatactctggataatgttacataaaagttgtgaaactctgtaatcatttttgaaaggatactgtataataattaattatgctgtatatttacgcatgaaaacaaagcactgtaagggacactagttgttagagtgatatgtctcaaagcgaatcatcttcaaattgtaaaaattcacactggggaatgttggcaagatcaagacattattaaagataataataagttatatatcaaatgtgaactgcatcatttctctgcaccaaattttaccacacagctgcctatgacaatttaaacaaaacacccaaacacattataaatcatgcatccccccaacaccctcttaagcaaaaacatctaccaagtatacaatcaaattaaaaccgtaggagagatttattagcttgtagatgttcctaattattcgaaaaacttgtctgacgttcaatagcaacatcattcaagagcacagttcaatcttaggaaagggaatccagtcatgaaactgatcgtagagaatgtttattaagtctgtgttccagggcaaagcaaacttttgggaaataggctgggttttattctataatgcacacaataggtctccgtctttgccgctatctagaaggcttgctacacacaggagatacagtcatacagcacgtataccaggaaaggggcaacaaggagggaaagggggtaagatttattaccttcaattatttttgttccaaactttcctcagggcacaggcacataatatatcgtactttccattacttagtacaaatgtaaaacatatctaaaaaacacatttcatcttcataacatattaaaataacaagtgggatgtcgtgacgttaaattgacagatggactgtcatttagcagtgttgtacaacatgagttaacagcaaattaatatcatcatatccaatttttcttaacagctagaagctatcagattggaaaaaaattagtaaacaaatctttgatttgttttgggggcgaaatagctaaaatatgcaaatgcgattcacatataattttaaaatagctaccttttacaaacttaaagacaaatggtaaatagtccaaaaactctgatctcagaatccgccccccccccaactttattgttcactaaggtattgattttttctgacaagttcgcatgtacattatgaattgactcataaaaattttcagcatattgtactgggtttattatagccatccttactatatattaaggccagtatcttttcatcaacaccagctgttaagcaaactcaagtgacacagtagattcatgattagttcacagaaaagaaagcaaaaatagagtgacataaatttaatttcattacactttggcatttaaagccatattttataccccactgaccacaaaggacttctctattgtaaaaaaatcttgctctatacaatgctaataacaacaccatttaccaaatgcaggttcattttagtttaaattctttatcaaattttgatatatccgaaataattttaatagtactgaaataatatgagaaaattatgtcttgcaaatttatcctcactgataagttaagggattctgcaggtcatttctgttaatatttttttctttacctagtgcataaagggtaggaacaaaagaagaaagaaaacttccagcctgatatcagggtttgagtcaaaacatcagcttaactttatctggctcttggagcagtagctggaagggtcgcaaaaacgtggctttaaatctttagtagctacattctagaaaaacataaagcagtgatgttataacattaaattgacctgcttcttatatactttttagcaaataagttataatttcctagtggaaacaagaaagacctgatttcaggaatgattgtatgaaactttaggaaggaatttacatgctttttgtttaaaacctgtgaattctacttcctttgaagagctaactcattccacaccaataccatataacttatttctccaggttttttatgtatgttaatttggtcatcccaagtggattttatattccttgaaaccaggggccatggcttaagcttcctctttattcccttattagcatagtgctaagcaaatagtatgtactcaataaatacctgattgtgaaattctagcaatgtttatctgtttttaaaaatctagccatattgggccgggcgtggtggctcatgcccataatcccagcactttgggaggctgaggcaggtggatcacctgaggtttggagttcaagaccagcctgaccaacatggtgaaattccatctgtactaaaaatacaaaaattagtcaggcatggtggcaggagactgtggtcccagctattcagaaggctaaggcaggagaatcacttgaacccgggaggcagaggttgcagtgagtcaagatcgtgccattgcactccagcgtgggggacaagagcaaatattccgtctcaaaaagagaaaaaaaatctagcaaaatctagctgtatttgtgttaccctcatagtccaattttactagctgtctgtctgccttttctgtttatgacttattctgagtctcattttttcttcattttatctgttactcaccctaccaccctgaacttctctttttctttctcttcccactcccaggagatactatctgtccaagtacatatatatatatacacacatgcgcacacacacacacacacatatatatatccaagtacatatatatgagtacatatatatacacatacaatcgtaaatatgcaacatactttagaaattatgtaatattataattttatatgttgataatttagagttttatatataaacaataagtatactttgttcctatcttattggtttaaaagaaagctagaaaacaggctgggttcagtggctcacgcctgtaatcccagcgctttgggaggccaaggagggtggatcatttgaggtaagaagttcagagaccagcctggccaacatggtgaaaccctgtctctactaaaaatacaaaaattagtggggtggcggtggcgcgcacctataatcccagctactcaggaggctgaggtgggaggattgcttgaacccaggaggtcgagggtgcagtaagccaagattgcgccactgcaccccagcctgggcaacagagtgagaccctgtctcaaaaaaaagaaaagaaaagaaaaagaaagccagattttttaggttatcttaaattgatttttctccctaaaataactgatcgtttcttctagtggtttgtctacattatcccaaaatacagcaataatttcaatcaagtatcacattctctacttaaaatatttaattctactaatttcttgaaaatgtattttgcagtatttgccagttccattggaagaaagtggttgttactgacaaaagaggattttaaaaaatcattcttgattttttatagtggtgttagcaatcctatctccactcaatgctcagccattcctaggttatgaagctttgagatttctgattattttgggagaagtacatctagtatagtaattgatactacatatagaatttagtaggaaaactaaattcaattcttaccctcgtaataaaaacagaatggtggttcagtttccgtatctgtaagatctgaattgtgtcattcattcattattcataaagaaatgtattgtgccagttagagtaatattaacaaaaggtaaaaaaaaatctagtaatatgatatatgtaatgcaattattatactatttgaatatcaaaatatttcagaaaattttatactgtaatttgaactatactgtggataggtactttgagcaaaggcttatggaaggtcaatattcagatttgagattttggcattaacaatgtgtggctgaagaaataaattaatctctgtgttagtaaattgcagtaacataggtattttaaatacaagttggctaatggtaacagttttctatggtaaaaacttcctatttcaagtaccctgaatggtgcttattgcctttgtgaagtataaggttttaaaaaaatctaaaactggaatcagaatattattattattattattattattattattattgttatttattacttttgacacagggtctcgctgtgtcacccaggctgaagtgcagtggcatgatcacagctcactgcagcctcaacctcctgggctccagagatcctcccacctcagcctcttgagtagctcagaccacaggcacgcaccatcacaccaggctaatttttttattttttctagagacagagtttcaccatgttgcccaggctggtctcaaactcctggggtcaagccgtcctcctgcctcagcctcccaaagtactggtaatacaagtgtgaaccaccatgcctggcccagaacattattttttattttattttttattttttttaactgcttcttgcagagcaggactatcccataggcagtgtgcccagaatagcccagaacattccatgatcctgtatcaaataagtaactagtcattacgaatctttaaacttaccttaaatgtaggtgcagaaagaaaaaaaaaagtaactcccccatgagatttatccagagtgactgtcattaatctactgattaccactgtatgtgaaattccatcagaattgtctttctaactatctgtttttttttttttccaatgacaagtatttgtcattgtaaccattgtaacaggcaactgtgatataataaaaaatgtatatctgacctttgtcctggattcctggcacagacaaaaacccatggaatttcctgagtgataggagtgtctttattatgctaatgaaatgactgggcaaagcccctagatagtttcaagaggagggccggtcatcagaaagagtaacaacatgattaaaagattggagcattaggccgggtgcggtggctcacgcctgtaatcccagcactttgggaggccgaggcgggcggatcatgaagtcaggagatcgagaccatcctggttaacacggtgaaaccccgtctctactaaaaatacaaaaaattagccaggcgtggtggcaggcgcctgtagtcccagctactcgggagactgaggcgggagaatggcgtgaacccgggaggcggagcttgcagtgagccgagatcgcaccactgcactccagcctgagcgacagagcgagactcgtctcaaaaaaaaaaaaagattgacacattgaccagcccaactgtcagagaggggaggaggctggagagttcaatcaggtggctgatttaatcaatcttgccaacgtaaggacaccacggctcagggaagcttcctggctggtgaacatatccatatactagtggcacatcctgactccacagagatagaggctcctgtgcctgggatccttccagaccttgttttggttatctcttcatctaactgttcatttagatcctttatagtaaaacaattatttcaagtatagtgctctcctgagttctgcgagtcattctggcaaaccacaaaacacaagggagctgtgggaagcctcaatgtgtagctggctgggcagaagtgtgggcgatttggtaacacccaaaacttatgactggaacctgaagtggaggcaatgaaggactttgtcctaagcctgtggtgtctgatggtgactctgggtagttggtgttagaattgaattgaactggaggacacctggttgacatcaggtaactgggtgttgaaagacagcaacaaacacttttatttcaagaattgtaaacttttggatttatttctactctgcttcctgcaatgtgtaactaaacaatttaaatagtttttaaagaaaagatgtcagtgatgtcacaaccattacaccaattgctttttctaaagttactttcattttaacaaaacaaatttttaaaaacccaaattattacctactaataatacatacgcagaatgcacagggcatgaaaataaaagccatcgtgtatgtattcaaaggtctttattacaataatttttatagaggtcaaaagtgaaaccaaacagactatgacttaatgggaaagcaagagctaaaatgccaagaactcaaaacactagaaattttagaatatgaactttctgtttcatgaatgtctttataaaattgtctttgtcaactatacaatacgaattctgctatttaaaatagaatttacattaaactctagataaaaagcattctgctaatttttgtttttgcaataaaagatgcagtgccagcatgaaaaaggttggattacaaattcagagagcccttgagcacaagactgtactgagagttaaaaatcatcataaacattggtgaattccacatgtctcaaagaattatcaattttaaagatggatgagaaacggatgaaacatacagtaaagttgccacaaggactaagtaaaagtcctcaccactatttttactaacacttaatagtcaacagttctaaaacatttgctaaatgcacttactagaaactgagggatgtgaaagttacttataaaaaagaaatgctgaagattcaggaaaaaaaaaggtcagttcctttctgatacaatgcatttcacaatttaaataattcatctggtggtaaaatctgaaaaacatattttccagcacaccttatccacttatcatagtataggaaaataagtggatttcaatttggtgatttaacctatagctttaaatctttaataaacaaacttgaaattccaaactttaataatgaaaaggccataactgaaatgatgtcaaccctggatatgaatctcttaccaacatgatgaaagccccacttggagagccgcacttctggtcagcagctgcatttttgttttaataaaaggagaaagggtgccagcacaccagtgcgatccaagacatggttactacataagcagtaggattaattgcttttccagaaagccagagtaagctctccttccactgtcccatcaggatcagcttccataaaatgagtgtaataagataatgtattacatacgccagtaactcctaccagcagtattcagctgcacaaagccatacatatcaatcaataaaaacttcattgctacatatatttcacacaccacattttagctctgtctttaacgtgcagataagataggctataaagaagcaaaagtgcattttcttacccctcaaagaatctgtccaccattcctctactatcttcttgctagcaagataaagagaaataaatatgtattagagattttggaaaaacagctctaacaatatgaaggatctggtttacaaaagctacaaacattttaattagcacccagatgattaatatatgattttatgattgatgaaatttggagagatcattttattaccccatgtataggcaagagaaggtacatttaggttgtgttgtaccatgatgatttcataggctcacaccatccttttgaggtgaacatggaggaaaaagttatttctaaacacagaagggagcatgacaaaggttaccctccaatcagaaaaagaaatattttcttctagttctacagtacggagcttactaaatcatttaggtttctagaccacaacctaaatgtatcttctcatggctatatatggcataatcaaatgatccctccaaaacctatcaatcattttggaaactattagagagcctaaaaaccatatattcagatttatttaataagtacagcagttctgagattcattttgaaattctggcccacttatgaatatgacacaatgtactactattttagaaactgaaggtttctcttggagattttttttaagataggtctttctatttaggggagtagatagattattgttgtccagtgaaatataaaccaaacctaagacaacctctttactcaaacaaatgctgtttgttgaaatgatataaagaatcatttaggtctctgcttcaaatctggggaaaaacaaaaacaaaaggaaaattatgatgttaagctaaaaatgtttaacctgcataccttcttaatctctctctctccttctctctctctgtgtgtgtgtgtgtgtgtgtgtgtgtgtgtgtgtgtgtgtgtgtgtgtgtgtgtgtctgtagcattgaaaataggtaaaaggaagaaattactgcctttactcagaaatattccatagtagctttaggaaaaatagtatgtacaatattatcattttgaaagcaagctatcagctgcttaaaatattttaacaatatcaacctagcattttctaaattcttaataaaattcttttttgttgtagcctttacctaccctgagaaaaaacatacaatactattcatcctctattataatgtccctgatgatttccaaatgtttctttgctatgcagcagaagtatatgatttctgatccagatgctttaaaaagcaattctaacaaagaaacttaatctgaactgaacttggcacggattccaaaaacctataggatgatgttttggaagctgctcaaacaaaagttgaaacagaaatatgcatccacaaccatatatctctggctgttattaataaatgaaggatacagactttttccataagtgtgggtgaatagaagttaatgcttataaaatacagtttaagtatcaaaacagtatttgagattgatgctttttcttttaaagcaaaagcatttgtttaattcacaagaaggtaaaaatcaaataaagaaatgttatacttgttctttgaaagatattcagaaactccagtgcccaaccgcaagaaaggagttattttctttataatatgtagcacatttatggcataaaagtctacaaaatattaatatagagagataagggtatttggagtcagtttcttccagtgaacaagaataagtcaggtacacaggtttgcagactcattttggagtcccagaaggagaggagaggaagaatgggccaaaacaatatttgaagagacaatgcctgagaattttagaaactcagaaaatatatcaagccacatattcaggaactgctacataccccaggaacaataaacataaaaaatcgtacactagtaaaatcatagtaaagtgttaaaaatcaaaggcaaagagaaaaatcctaaaagtagtcagaggaaaggacacatgacatttcaatgtaaacaatggaagtcagaagacaatagattgttattttcaaagtgcttaaagatagtaactccaacctagaattctatcctcagtgaaaatatctttcaaaaatgaatgtgaaagaatattttcagacaattaaacactggaagaattgattaccagcagtccaacactaaaataaatactactatataaaaaatataatttatttttgtacattgactgtgtatcatgaacccttattaaacccaccgattagttctagtagctttttggcagattccttaggatttttttacataggtgatcatgttgtctatgaataaaaacagatttacttattgctttccaatctgtatgactttttttccccttcctttgttgcactggctatggcttccagtacaatgtcatatagaagtgatgatggcagacatcttactttgtttctgatataaggggaaagcatttaatctttcaccataattaagcatgctagtggctgtaggtttttcataaatccctttttcagcttgtttattgaaagtaaatggatggtgaattttccaagagcttttttttttttttttttgagacagagtcttgctctgttgcccaggatggagtacagtggcatgatctcggctcactgcaagctcccccacccgggttcatgccattctgctgcttcagcctcccaagtagctgggactacaggcacctgccaccacacctggctaattttttgtatttttagtagagatggggtttcaccatgttagccaggatggtctcaatctcctgacctcatgatccacctgccttggcctcccaaagtgctgggattacagccatgagccaccgtgcctggcccgagtgctttttctgcatctattgagatagatgcatgatttttcttttttagactattaataggatgattacattgattaccttttaaataatcatggattattttttaaaactcacagattcatagaaagttgcaaagatagaacacagaggtcctgtatatcccactttcctctattacagtttcatctgtaatatgaaatgtggaaaaccacagaactctgataaaagaaatcaaagatctaaataaatgtagagatagtccatgttcatggattgagagttacactgttaagatgtcagatcttcccagcataatctatagattaagatggaatcccagtcaatatctcagcagctattttgtggttaccaacaaactgattcccagttacatcttatataattatagtaaaataccaaaaccagaatactaacattgacatgaagtgtatgtacagttctatgccattttataacatatgtagattcatgtaaccaccactgcaataaagatacagaatgattccaagtccatcactaaaaagatcttcctcatgctacatctttatacccatttccctccctgccaccatttctaacctctggagaccactgattgttttttatctttataatttgtcatttgaagagtgttatataatggcatcacatagtatgtgttctccagagagacagaagtgataggatataaagagagagatataaaaagaaatttattaagggtattggcttgcttgactatggaggcagagaaatcccacaatatgctgtttgcaagctgaagaagcaggaaagctgttagcacagctcagtccaagtctaaaagcctcagaacaaactaagccaatagtgtaactctcagtccgaggccaaaggcccaagagcctggcgggagggactggtgtgagtcccagagtccaacagccagacaacctggagttctgatgtccaagtgcaggagaaaaagggaatcttggctccaaaagagagagagaggaaatttgctgaaatcctccacctttttgttccatctaggtccccagctgattgaattatgcccacccacagtaagagcagatctttctcactcagtccaccagctcacatgccaatctcttttggaaacacctcacagacacacttggatcagcccaatcattctaattaaaagtgaaaccacctagtctccccttcagcagaagagagatgggctcagtgcctaccgaagcactgagaatacataatgctttaccagctatctgggtatcccttaattcagttaagttgacactcaaaattaatcatcaaagtatgtgaccttttgacattggcttttttttcactcagcatatgccgttgagatccatccaaactgggtatgtatcaatagttcactcctttttattgttgagtagtattccgtggtatgtaggtagcacacattgtttaaccatttacctattgtagaacattgtggttgcttctggtttctggctattacacacaaagctgttatgaacaatcgtgtatacgtttttgtgtggacataggttatcatttttctgagataagtcccaggagtgcaattgttgggctgcatggtaagtacatgtttggtttattaagaaattgccaaaatatttgccaaagtagctgtaacattttacatcctctccatcaatttataatagatccagtttctttgcattcttgttagcatttgatattgtcattattttttactgtagtcattttgataggtgtgtagtgatatgtcattgtggtttaatttgtatttccctaattcctcatgatgttgaacatcttttcatgtgcttatttgccatctgtatatcttctttggggacatgtctcttcatgtctttttcacattttttaattggattgttcaatctttttaactgttgagttttgagaattgtttatttattctagataccagtcctctataagacacttggtttgcaaatatcccccaatcccgtacactgtagctaattcttccatcctcttcatatgagctttcaaagaacaaaagtcttattttaattgaaatcaagtttagagaaacaatttattgatttttttactatggattttgcttttggtgtcaaataactctttgtctagctctggatcccaaattttctcctatgttttttcgttaaagttttatagctttttattttacatttaagttcatgattcactctgagttaatttttacaatttttgtatgagatttaggtcaaggtttatatttttacctaaggatgttcaattgctccagcatcatttgttgaagagattatctttcctccattgaattgctataacaccttcctcaaaaatcagttaaatatattgctgtggaaatatttttgaattctccattgtgttttattgatctgtgtctatccctccagcaatatgtctctgtcttgctgagatgagagatattgtcttgtcttattattgttatataataagtcttaatgtatggtaaagtgattcctcccattttattctcttgtcaagctactagtctgttgcctttttgaagaattttatctatatttatcacaactcttgctggattcacagtaaatttatatatcaatttaaggagaactgacatctttactgtggttagtcttcctatcttgtgaacatgtatctcaccatttatttagatcttctttgatttatttcattagtattttgtagtttttgacatacaagtcctatacatgttttattagatttgcatctaggtatttcattgttaaagtgattttaagtggtgttgtattttccacacaaactgtagaatcagtttgttggttaccacaaaatagctgctgagatattgactggggtttcatcttaatctatagattatgctgggaagatctgacatcttaacagtatgactctttcaatccatgaacatggactaactctccatttatttagatttttaatttcttttatcagagttctgttgttttccacatttagattttatacatacattgttagacttatacttatgtaattcattatattggtactattataaatgttttttaagattttgaattccaattgtacattgctggcaatagaagcaatcaactattgtacattaactttgaatccttcaactttgctatatttacttatcagttctagcagatgtttttcaattcttgggattttctacatagctatacattcatgtcattagctaataaagacagttttgtttcttcctttctaataaaaggtatgcaggttgattttatttccttttcttatcttattgtaaagctagaatgtccagcatgaacttgaataaaatggcaagagatgatatctttacctttcttccagtcttcagagaaaagctatctagtttctcatcactaggtatgatattagctgtagggtttttttctagatgttctttatcaagttgaggagtttacagagaatttttatcatggaatgtgtataaaattttatgcatcttttttatgcaccaattgatatgactgtatgatttttcttctttagattgttgatattgtggattacattgattttcaaatgttgaaccaggcttgcatagttatggtgttaacactttttacatattgttagatttgacttactgatattttggtgagtatttttgcatctatatttataagagatattaatgtgtcattttctctttttttttaacggactttgtgtggttttggtagtgggtatattaactctgtaaaatgaattgagaatgttcatttctcttctattttctggaaaagattgtgtagaattgatgttaattcttgaaatgtttggcaaaactctccagtgaaaccatctgggcctgaagatttctttttctgatgtcttagaattataaattccatttccttaatatttacaatgctattcaaattatttattccatattagatgagttgcagtaatttgtgcctttcagagaattggtcccttcaatttgtcaaatttatatgtagagttgtttttagtattctcttattttcacctgcaggctctgtagcaatatctctgtttcattattgacattggtaacctgtgtcttctctttttctgtcagtcttgccagagttttgtcaattttattgatctttcttaaaaaaacttttccttcattgattttttcttttttctttttgttttttttctttttcttttctttgtttttttttttgagacagagtctcactctgttgtccagtctggggtgcagtgcaatcacagctcactgtagcctcgacctctcaggctcatgcaatcctcccatctcaacctcccaggtagcaggaatttcaggcacatgccactacacccagctaatttttaatttttttgtagagaggcaggcttactatgttgcccaggctggtgttgaactccttggctcaagcaagcctcccaccttagcttcctgaagtgctgggatcacaggcatgagccatggtaatatccacccagctatttttttttaatttcattgatttcttgtgtttattatatattttcttatgcttgctttgggtttattttgttcctccttttctagtttcctaaggtgagaagtttgattactgatttgagacttcttttctgatgtaaacattaagtgctataaatttccctttcagagctgctttagttgagtcccataaattatggtatattgtattttcattttcatcatgttcattcactgcaatatatattatatatatatatatatatacatatatatatttccattgagccttcctcattgacctgcagattatagtatttagagtcagttgcttagtttccagtgcttaaagattaccctgttatttcctttctctttctgctatttgtttccattggtttctagtttgattccattttggtcaatcatcatgtggtttcaattcttttaaatttattgacttttaaaaatagtccagggtatagtctatcttggtatatgatctgtggctgcttgaaaagaatgtatagggcaggcacggtggctaacacctgtaatcccagcactttgggaggccaaggcatgtggatcatccgaggtcaggtgttcgaaacgagcctggccaacatggtgaaaccccatctctactaaaaatacaaaaaaattagctgggcatgtggcgggtgcctgtaatcccagccagttgggaggctgaggcagaagaatcacttgaacccaggaagccgaggctgcagtgagccaagatcacgccactgcactccagcctgggcaacaagagtgaaactccatctcaaaaaaaaaaattaaaaaaagaaaaaaaagaaaaaagaaaagaatgtatactctgttgtttggtgttgagcaaatgcttttcctgctggttcatggttttttgagctcttctatatcgttgctgattttctatctaggtattctatcaactgctgagtataatgttaaaatcaccaataactgtgtgactatttttccttttagttctatcagttttgtcttcacatattttgcccttcggtagctttgtgcatacacatttagaattgctctgtcttcttggtgggttgacccttttattattgtgtaatttccctcttttttcctggtaatttcatttaccctaaagtctactttgtctgatagcgcattactatattttttctgctgtccttctttcctgaataatattgtcctggatatagaattctgaatcaacagttcttttctttcagtacttgaaaaatattgttccactttcttatagcctccgtaacctctgataagaaatctgttctcacttgaattgcttttcttatagagtaagtgtaatttcttacacatttcattctttttttctttagttttcagaagtttgactatgatgtcttcatggatctttggtttatcctgtttgacggtcgctgtttcttgaatatgaatgtatatgtcttttgctaaatttggaaattcttcagccattattttgtagaatacattttcagtaaggtgtttcatttgggaattataaaagtatcttttaaaataatttctaatagaattccattatagtcaaagcacaaacttatttgaaatcttttaaatttattgagagttgttaatggcccagaatatggttagtgtggtgaatattccatgtgaaattgaaaaagaaaaaaaagtatatcctgctgttgcttggtgagtgtttttttaaaatatctttattaagatataagtcataagcaataaaaatcacacagagtttaatgtttatattcacagagttgtgtaaccatcaccacaaattaattttagaatattttaattcccctctaaacaacatcccatacccattatcatccaattcccttggctatcccagtcctaagcaaccactattttaacttctttctgtttctacagtttaaaaattgagatataattcacatattatgtaaaaacaaaatttacccattgaaagtgtacaatttggtggttttcagtatattcacaaggtggtgcaactgtcaccactatctaatttcagaatattttcatcacctcaaaaagaaaccccatagccacttgcagccacttcccatttccttctaatcctcccagccctaggcaatcactactttttgtttttatggatttgcctattttggacatttcatataaatggaatacaatatgtggtcttttgggactggctttttctcttagcataatgtttttaaggaacatctgtgttgtagcatgtatcaatactttatttccttttattgctgagtaatagtccattacacagatatacattttatttatatattctttagttgatggagatttaagttgtttccattttttgctattatgcataatgttgctatgaacatttatgtacaaatttctgtgtggacatatgtttttatctcttctgagtattgacctaggaatagaattgctgagtcgtataggaattctatgtttaacttttttgagaactgccaaactgtgttccacagcagctgcaccgtttacattcccaccaacaatgtaggaggtttccaatcactctgcatcctcaacaacacttgtctttttagttacagccatcccagtgggtgtgaagtggtctcattgtggttttgcatttccctaataaatagtaatgttagcatcttcctatgtgcttattggctacttttacatttcctctggagaactgtccatttggaacatttaacccatttaaaattgggttatttgctttttttattattacattgtaagaattctttatacattcagaatatgaatttcttaatagatatatattagcaaatatttgattgtattctgtgggttgccttttaaaatttcttgatgatattgtatgcagcacaaaagtttggggtttttttcgttttttgtttttgagatggagtctcgctctgtcacccaggctggagtgtagtggtgtgatcttggctcactgcagcctctgcttcccaagctcaagtgattcttctgcctcaaccccccaagtagctggaattataggcatgtgccaccacgcctggctaagttttgtatttttagtagagacaaggtttcatcatgttggacaggctggtctcaaactcctcaagtgatctgcctgccttggcctcccaaagtgctgggattacaggtgtaagccactgcgcccagccatttgtagcacaaaagtgggctgttttttttttgttgtgtgtgttttttgtttgttttttttgtttttttttttgagacagagtctcactctgccacccaggctggagtgcagtggcatgatctcagctcactgcagcctctacctcccaggttcaagcaattctttttttttttttgggacggactcttgctctgtcacccaggctggagtgcagtggcacgatttcagctcactgcagccaccacctcccgggttcaagcaattctctgcctcagcctcctgagtagctgggattacaggcgccaaccatcacacctggctaatttttgtatttttagtagagacggggtttcaccgtcttgtccaggctggtcttgaactcctgaccttgtaatctacccacctcagcctcccaaagtgctaggattacagacatgagccactgtgcctggctggttcaagcaattctcctgcctcagcttcccgagtagctgagattataggcgcccaccatcacacccagttaatttttgtatttttagtagagatggggtttcaccatgttgaccaggctggtctcgaactcttgacctcaggtgatccacccgcctcgtgctggaattacaggcgtgagccattgtgcccagccagcacaaaagtttttcattgtgatgtagaccaacttatttttctcatgttgcttatgcttttggtgttgtatttacaaagttgttgcctaatccaaagctatgaaaattaactccataactttattctaagagttttataatttaatcttttatatttaggtgtacaagccattttgaattatgttttccatacggtatgaggtaggagtccaaccaaaatttagaaactcagttgtcatggcaccacttgttgaaaatactattattttccaattaattattgtgcgcctttgtccaaagcttagagttctttaaataaattaaattaggtcaagttggctgatagtattagtcaagtcttctaaaatcttgcttgtttttttgtccagttgttctataaattaatgaaaatgaggtattgaaattttcaaatataattgtgaacttgtccatttctgcttgaagttctttcagtttctactttatgtattttgaaaaccttattactaggagtagaaacatttaggattattacatcttcttgatgaattgatccctttattgttatgaaaataccatatttatcaatggtaatatccttggcacttatatctacttcatttagaattaatataacatttcaggtttgtttggttattattagcaagtattatattgtgatttataatgagaaaatatgtattttcatatttgtccctagttcctgacacagagttcctagaactcttgtaattgcccagatgacaggagcatcttttgttctaatgaggcaactcttggtgggctgctggatgggggcggatgcctgaaagaccaagccatgattagaagcttgaaactttcagcccccatttcctaggataggagaaaggctggagattgagttaataatcagtcatgtctacatgatgaagccaccataaaaatccctgaactacaggttcaaggggcttcccagttgtgaacacatccatgtgccaggaggggtggtgcaccccaactccatggggacagaagctcctgcactaggaacccttctagaatttcccctatatatctcttcatctggctgttcatctgtatcctttatcatatctcttattaataaaataaactggtaagtgtgtttttctgaggtctgtgagccattttagcaaattaatcaaatctgaggagagggttttgggaactgcagcttatagtcagtcagaagtatagatgacaacctactacttgcaattgctgtttgcagtgaggagcagtcttgtggaactgaaccattagccggttggcctgactctaactgcaggtagatggtgtcagaagtaaattgaattgtgggacacccagttaatgtctgccggagaattgtttgctgtggggagaaatccccacatattttgatcacagaaattttctgtattgtgatgagggtaagagtgaaaaaaaatttggtttttcctatctcaagcaaaacatggtatatttttctacctcctacttatttttttacaacttttaatagctacataatagttgtatgtattttggtaatacatgtggtattgtgattcatgcatataattgtaaagatcaaaccagagcaattgggatatctatcaccgcaaacattcactccttctttatgttgggaacattccagttcctctcctccagctatttggaactataaaacaaattattgtgaactatagtcaacctgctgtgctacaaaacactagatcttattccttctagctgtttgttgtacacactaaacaacctctctttacatcccacctcctccaacatcttccagtctctggtaaccaccaatcatctctccacctccatgagatccgccattttagctcccacatatgagtgagagcgtggactatttgtgtttctgtacctggtttatctcacttaacatgatgacctccaattccatctgtgttgctacagatgacaggatttcatttttatggctaaataatattccattgtgtatttgcatcacattttctctatccactcatccactgataagacacttaagttgattatatatcttgactattgtgaataatgttgaaataaaaatgggagtgcagatagctcttcaacatactaattttctttcttttgcatgtatacccagcagtgggattgctggatcatacagtatttctatttttagtttttgaggaacctccatactgtcttccatggctatattaatttacattcccaccaacattgtacaggtgttcagctttctctttatgctcaccagcatttgttattttttatctttttgataaaagcctttttaattggagtgagacaatatctcattgtggctttgattcacattttcctgatgatcagtgctgttgagcattttttcctatacctataggcaatttgtatgccttcttttgaaaaatgtctacccagatcttttccccattttttaattggattatttgggagttttagggttttttccaattttgttttgttttgttcttgctgttgagttacttatatatagtctctagtcaactggatagtttgcaaatattttctccattctgcaggtcatctcttcactttggtgattgtttcctttgctgcgcagtttttttagcttgatatagtgccatttgtctatttttgcttttgcttcatgtgtttttgcagtcttacactaaaaaatctttgccagacccatgtcctgaagcatttcctccatgtttttcttctactagtttcattgtttcaggtcttatgtttaagtctttagtgcattttgatttgattttgtatatgctgagagatagcgtctagtttaatttttctgcaaatgattatccagttttcccagcaccatttattgaagagataccttttcccaatgtctgctcttaatgcctcaattgaaaatgaaatggccataaatgcacaattttatttctgggttctctactctattccattgactcatgtgtttattttacacttgtaccaagctattttggttactatggctttgtagtatattttaaagtttgttagtatgatgcctccagctttattctttttgctgaagattgctttggctacttgaagccttttgtggtttcatacaaattttaggagtttttttctttctgtgaagaatgttgttggtattttgatagagattacattgaatctgtagattagtttggggagtattgacattttaccaatattaattcttccaactcataagcatgggatatctttccattttttgtatcctgttcaatttctttccacagtgttttttgtttgtttttaagatgggatcctgttctgtcacccaagctggaatgtagtggcatgatcataggtcactgcagcctcaaacacctgggctcaagtgatccttctgcttcagcctctcaagttgctgggactacagacatgagccaccatgcttagttaacttatttttgttattattaatattattattatattatttgtagagacagtgtctgaccgtgttgaccaggctggtcttgaactcttggctttaagcaatccttggcctcccaaagtgctgggattatagacatgagaccatccatggcctcatcaatgttttatagttttccttgtggagatctttcacttctttagttaaatttattcttatttttttttgtagttattgtaaatgggattgctttgttgacttctttttcatattgttctttgttggtgtacataaatgctactaatttttgtatgttgatttcctatccagtaactttattgaattcatttaccaaatctaaacttttttttgatggagtctttagggttttccaaatgtactagtatgtaatctgcaaacaagaaatttgacttcttcctttccaaccgaatgttctttacttctttctcttgcctaatttctctggctaggacttccagcactatgttgaataaaagtggtgaaagtggacattcttgtcttgttccatatcttagaggactttccatttttcttcatttagtacaatgttagctgtggctttgtcatatgtggcctttattgttttgaagtatgttccttctaaacccagtttgttgagagtttttttttttaatcataaagggatgttgaattttgttgaatgttttttcaacatctattacaatgatcatatggtctttgtcctttatcctcttaatgtgatgtactgcatttattgattgacatatgttgaatcatccttgcaatcctgggatgaacctcacttgatcatggtggatgatctttttaaagtgttgttgtattctgttattttgttgaggatttttgcatctatttttatcagggatattggcctgcagatttcttttttagtgttgctcttatctgtctagttttggtatcagtgtaacactggcttcatagaatgagtttggaagtactccttcctctttaatgttttggagtagtttgagtagaattagtattcgttcttctttaaatgttaggtagaattcagcagtgaagctatctgggcccaggcttttctttgattttctatttcttcatagttcaatcttggttgcttgtatgtgtccagtaatttatccatttcttctaggtttttcaatttgttggcatatagtcattcataattgtctctaatgatcctttgtatttctgtggcatcaatttttatggcttctttcttgtttctgattactcggattttctcttttttttttctatttagcaaaagctttgtctattttatcttttcaaaaaaaccagctttttgttttgttgatttttctaatattttttagtctcaattttatttctactctgatttttaatatttatttccttctactaattttgtgtttggtttgttcttgcttttcttgtttcttgaggtgcatcattaggctgtttatttgaaagctttccactcttttgatgcaggtgcttgttgctgtaaactttcctgttagtattgcatttgctgtatcctgtagattttgatatgttgcatttccatttgcatttgtttcaagaaattttgaaatttccttcttaatttgttcattgactcactggtcattcagaagcatgttatttaatttccatatgtttgtatattttccacagttcctcttgttactaagttctagttttattccactggggtcagaaaaaatacttgatatgattttgattcttttgaatttgttaagacttgttttgtagcctcatagatggcctattctagagaatattccatgtgctgatgagaagaatgtgtattctgtaacagttagatgaaatgttctgtaaatgtcagttaggtccatttagtctagaatgtagtgtaactccagtgtttctttactgattttctgtatggatgatttgttcattcctgagagtgaggtgttgaagtcccctactattattgtattatagtcttatctctccctttagatctattaatgcttgttttatatatttgggggctcctgtgttgggtacatatatatttactgaatcttcttgctgaattgatccttttatcactatatataccctgtttattttactgtctttgacttgaaatctattttaactaatataagtatagctacttctgcttagctacttctgctcttttatggtttccatagaatatctttttttcaactctttcaactctaacaatattacagtatcccaaatttgtctatatactgacttttaccagtgaattttatactttcaaatgttttctttttgcatattaggatcactttctgttatattgaaaactcctcttagcacttcttgtaagataggtctagtggtgataaattctctcagcttttgcttatctaggaaagactttcttctttatgtttgaaggaaaactttgctgggtacggtgctctcagttgacagtttttttttcttcaggacgttgaatatgtcatccactccctcctgacttgtatggtttccgctgagaaatctgttgctagatgaatcagagctcctttacgtgttatttgcttcttttctcttgctgctcttaggatcttctctttgtccttgatgtttgagagtttgaatgttatatgccttggggcagtcttatttggattgaatctgtttggtgatcactgaacttcttgtacctggatatttgtgtccttctctaggtttggaaagttttctgttattattattactttgaatatgctttctacaccttgctccttctcaactccctctcgaacaccaactcctagacttgctcttttgaggttattttgtatatcctgtaggtattcatcattctttttcactcttttttcttttttctcctctgactgtgtattttcaaatagtccatctttaagcttcctgattcttttttttggctcaattcattctgctgttgagagcctctattgtattttttcagctcagcaaatgtatttatcagttccaggatttccatttgattgtttttattagttctatctccgctatatttttctgataaatttgtgaattgctttttcatgttaccctggagttttctgagtttccttgaaactgctatttttaatgcttgatctgagagctcacactttgccattatggtagggttgatcactgcctccttgctttgttgacttggggaggtcatagtttcgtttgctgttgtttcttgtggatgtacatctatggcttcataggattagttcctatgcttcaaggattagttacttgtacctatcttcacttcatctcttgttttggcctttctaggttatgtttcctaagaggtcttttacaattgtttgttgaatccctttactcctagattgctgcctcattttcagcactagatggcgccttaagcccagggttgtcttgactctcacaaacgttcattattctaatttcattcttccacatgtcagtatacaacttttctagcatcagttattgaagggactgtcttttcctcattttgtattactggcatctttaccaaaagtctgttaaccataaatgcattgatttttttttttttttttgctctctattctgttccattagtagatgtgtttttaatgccatttcataatgtttgaattattacagctttgtaatatagtttgaaatcagggggtgtgatgtcttcagtttgttctcctttctcaaaattgctttggccattatgggtcttctgtggttgcaaagtttagtattgtttttttctggtcctgtgaaaaaagtcattgaatttttaatagggattgcattgaatctgtagattctttggctagtatgaacgttttaacaatattaattcttccaatccatgaacataagatttcttttcatttatttgtgacttcttcaatttctttcatcaatgtttaatagttttcagtgtacagatatttcatttccttgattacatttattacttatttaattaaccatttacataatttaaaaatttgtctgctcctttcactggactatgatctctagtgtctggctttgttctcccttgtatttccaggacccagtacagtccttgctatagagtgtatacttaataactatttgttgaattaattaatttaaaaattagcaagtttcacaagtggaaatgaaaacccaacataccaaaacctatgggatacaaccaaagttgtaataagagcaaagtttatagcagtaagctcctatatcaaaaaagtataaaaacttcaaataaacaacctaacaatgcatcttaaagaaccagaaaagcaagagcaaacaagccaaaattagtagaagaaataaaataataaaaatcagagtataaataaataaaatctaaataaaaaaatacaaaagatcaatgaaacaaaaatttgttttctctaaaaagataagcaaaatagaaagacctttagcctaagaaaaaaagagagaagatccaaataaataaatcgagagatgaaaaaggaaacattacaactgatactggagaaattcaaaggatcattagagactactataagcaactatatgccaataaattggaaaactcagaagaaatggataaattcctagacacatacaacctaagattcaaccataaagaaatccaaaacctgaactgacccataacaagtaagagatcaggccaggcacagtgggtcacacctgtattcccagcactttgagaggccatggcgggtggatcacttgatgtcaggagtttgagaccagcctggccaacatggtgaaaccccacctctactaaaaatacaaaaatcagcctggtgtggtagcacatgcctgtagtcccagctacttgggaggctgaggcacaagaattgcttgaacccaggaggtggagtttgcagtgagctgagatcacgccactgcactccagcctgggtgacagagtgagactgtgtctcaaaaacaaacacacaaacaaaacaaacaaacaaaaaaaaaaaacagaaaaacaagtaatgagatcaaagctgtattaaaaagtctcccagcaaagaaaagctgacccaatggcttcactgctgaattttaccaaacatttatagaagaacgaatcctactcaaactattccaaaaatagaggaacttattctatgaggccagtattactctgataccaaaaccagacaaagactaataaaaaaaagagaactataggccaatatccctgatgaacattgatgcaaaaatcctcaacacaatacccgcgaaccaaattcaaaaacagactaaaaagatcattagccatgatcaagtgggattcattcaaaagatgcacagatagttcaacagatgcaaatcaatcagtgtgatacatcatattaacagaatgaaggacaaaaatcatatggtcatttcaattgatgctgaaaaagcacttgacaaaattcaacatcccttcataatagaaaccctcaaaaaactgggtatagaaggaagatacttcaacacaataaaagccatatatggcagacctacaactagtatcatactgaatggggagaaactgaaagcctttcctctaagatctcaaacaagacaaggatacccacgtttaccactgttgttcagcatagtactggaaatcctagccagagaaatcagacaagagaaagaaaaaaagggcatccaaattggaaagaaagaaagaaaataatccctctttgcagatgatatgatcttatatttggaaaagcctaaagactccacaaaaaagctattagaactaataaatgtagtatagttgcaggatacaaaatcaacataaaaatctgtggcatttgtatatgccaaccataaacaatctaaaaaagaaatcaggaaagtaataccatttataatagctacaaatgaaataaaatacctaggaataaacttaaccaaagatgtgaaaaatctctacaatgaaaactataaaacattgatgaaagaaattgaggagggcacataaaaaatggaaagatactccaggttcatggattggaagaatcaatattgttaaaatgtctgtattacccaaagcaatctacagatacagtgcaatctttatcaaaataccaatgacattcttcacagaaatagaaaaaacaatcctaaaatgtatttggaaccacaaaatatccaggatagcccaaggtatcctgagcaaaatgaacaaactggaggaatcacattaccggacttcaaattatactacagaaccatagtaattgaaacagcgtggtactgacataaaaatggacacataaaccaatggagcagaacagaggacccagaaataaatacatgcaactacagtgaactcatatttgacaaaagtgctaagaacatatactggggaaaggttagtttcttctatatgtgatgctgagaaatctggatatccctacgcagaagaatgaaactagacttctatcgcttgccatatagaaaaatcaaatcaaaatggatcaaaggctttaatctatgacctcaaactatgaaactactacaagaaaacattggggaaactctgtagaacattggactgggcaaagatttcttgagtaatatcccacaagcacaggtaaccaaagcaaaaatggactaatgggatcacaccaagttaaaaactttttgcacagcaaaggaaacagtcaacaaagtgaagagacaacccacagaatggagaaaatatttgcagactacccatctgacatgggattagtaaccagaatatataaggagctcaaacaactcaataggaaaaaaatctaataattgaatttaaaaaataggcaaaatacctgaatagacatttctcaaaagaagacatacaaacggcaaacaggtatatgaaaaggggctcaacatcattgatcatcagagaaatacaaatcaaaactacaatgaggtatcatcttaccccagttaaaatgacatatccaaaagacaggcaataacaaatcctggcaaggatgtggagaaaagggaacactcatacgctgttggtgggaatgtaaattagtacaaccacgataaagaacagtttggaggttcctcaacaaactaaaaatagaactgccatatgatccatcagccctactgctaaatatatacccaaaagaaaggtaatcaatatgccaaagagacatctgcagccccatgtttattgcagcactattcactagagccgagatttggaagcaacctaagtgtccaacagcagactaatggatcaagaaaatgtggtacatacacacaatggagtactcttcagccataaaaaagaatgagatcttgtcatttgcaacaacatggatggaactggaggtctttatgttaggtgaaaataagtcaaacacagaaagacaaacctctcatgttctcatttatttatgagagctaaaaaaaataaacaattgaagtcatagagatagagagtagacagatgattatcagaggctgagaagggtagaggggcttggaggggaggccagaagggagttgggatggtctaatggtacaaaatataattagatagaatgaataaagtgtagtatttgattgttacaacagggtgactgcagtcaacaataatttattgtacatttaaaataactaagagtgtaattggattgtttgtaacacaaagtaaggataaatgcttaaggtgacagataccccatttaccccgatgtgattattatgcagtgtatgtctgtagcagaatatctcatgtgccctataaatacatacatctaatggctgggtgcagtggctcacacctgtaatcccagcactttgagaagctgagacgggtggatcacctgaggtcaggagttcgtgaccagcctggccaacatggtgaaaccccatctctactaaaaatacaaaaattagccaggagtagtggtgcacacctgtaatcccaactactcaggaggctgaggcaggagaatcacttgaacccaggaggcagaggttgcagtgagccgagatcatgttattccactccagcctgggagacaagagtgagaccccatctcaaaaaaaaaaaaaaaatctatctatctatctatctatctatctatctatctatctatctatctatacatacacacacacacgtatatatacatctactatgtacccacagaaaaacatgttttaaagatacagcttaaaaaaaaagaataaaagctctaaaccctcagatatggtttggatctgtgttcctatccaaatctcacgttcatttgtgatccgcaatgttggaggtggggcctcatgagagatgattgaatcataggggtggatttctcatgagtggtttagtactgtccccttggtactgtccttaagttagtaagtgagttctcacgagatgttgttgtttaaaagtgtgtggcatctcccccctctctctcttgctcttgctccggccatgtgatgtgcgccagctcccacttcgccttttaccatgattgtcagtttcctgaggcctttctagaagccaagcagatgccagcatcgtgcttcctgtacagcctgcagaactgtgagccaattagacctcttttctttataaattacccagcctcaggtatttctttatagcaatgcaagaacaaattaatacaccctcctttaaaggagataaatgatgatgcgctcatacacaactacttagaaaatgctcagcccaccttaaaggaggaacttaaaagtcattaaagtattttaaagtttaaaaagtcagcaagtttcatataactttataattttcttattattatatatattgagttttatttagtttataactatttagtttagtttataaacattgagttttatttagtaaatcaaattattgttaacgctgttcatttatctgatatactctataattaacattcttgggacaaatctatctgcaacttaaaaaattctaaaagcttatttaatgcccctgatacttgaaaaactgatcacagagaaatcaaacaactaaattatatcatttataaaagctgtacaatattgaaaataatcttttctctttttttgattgatgttttgaattcactcctctaaagtcaaataacatgccaataacaaagacgtgatttatgtttggtaactcctgaaagaaaggtcagtggcagcacaatcagcataaaatacaatcctactttaatgactctgttagaatatgcagcatccatctttaattcctatttttaccagctgttcttgctatcttctgatttcctgcttaagactatacaaccttaaagtttcaattcaggaaggcagagacacattaatttacaaaatgacagtatgcaaaaaaaaaaacttttagggcgctcttacaatatgcatgcaaccttcaaatctcacatgacaaattttcaaaactaaatgcgttttttccttaaaaactgcatcataccataactaaagtaggtatagccaggcacagtggtgcatgtctgtagtcctagctaacttgggaggctgaggcaagaggaccacatgagcccaggagtttgaggctgcagtgagctatgatcatgccactgcactccagcctgggcaacagagcaagacctcacctccaaaaatttttttaaaaattaaaaacgtattactacatggcaaaatttatcatctttattttcatacagtttacagaaaatttatttataaataaatttatgatggctgaagcccaccagtagcacaaaatacaactatgtacacattagctaataaaaaatgtatgcacactcctgtaaatttcttaagttagaatataacaaccaaagaaaaattgcacatacatttgtttataaaatttatttaatactcatctacttacctacaaatctcaaacaaattggtaacgtatcatcagaattgacttaatattaaaaagccttgctagaatttagaatgttgactaaaatataccattgatgtttagaatgtacaatgtatatcattaataattgtaagcatttgctatatcgatttctaatcctttaagtttctattgatgttacctatatagtgagcgacatccttctctaaatctggaaaagctttgagcttcttaaaaggcaaaaaaatatatagaccatttcaaagactgtacatgtagtaactgaaattcatcagtaaggcataatgaaaaacaaacaaacaagcaggtccacaggctttgtaagcaattagacttggatttaaattctagctctcctactcaataactatttgacagtgggcaaattacttggcatttctgtgtctcagtttctttatatgtaataattttggtaatgattattcacaattgttgtcaggaataaattaaataatatacagaataagcacatatcctttccaactgaaattcagtgttacttacaccatgctttctcccacatgattgctcttaaatgtgcatcaaactttacagttcacataacactttgatatgtgtgtgtgtgtgtgtatatatatatatatatatatttatttatttatttattactttgagccacaggaagagcagagagaacaactccaattacagataataaaattaaggtttagagagtatcagcagtttgcctaaattcatcgtgttgtagcaaaatcattgtctttactgttatcaagaaaatttattttctattagggaggtaacagaaaaatattttgcttagaaaaacactttgatgtgaccctggggtataaaaaatgagattctgagaacatggacagctggagataggaagtaagagctaggtaatctccacattcgaaacaagcgggatttcaggcattagcatagggtcgaattaaaaatagaacagagtgaggaaggaaaaggatggttagcaatctttggggtcaccgaagcacctttaaagaatgggaggagtatttggttagctgcagtggcccatgcctataatcccagcactttgggaggctgaggcgggaggatcccttgagcccaggagtttgagaccagcctgtgcaacatggcgaaacctcgtctctacaaaaaaatgaaaaataagccgggtgtggtagcacatacctgtggtcccagctactcagcatgctaaggtgggagaatcgcttgagcctcggaggtcgaggctgtagtgagctgagatcacgccactgcactccagcctgggtaacagagcgagtccctgtctcaaagaaaaaaaaaaaagcataggagtaggtaatatacactgtgatgtgtaattctttccatttaaatctccctctttccaaatgtgcagtcaaccttgtagtttatgtatttacagacataaattcaagtaagtttctttttattcattctttttcttctcctttttccttccttttcctttttcctctctctttctccttctcttttttaaaaaaggaatatttattcaattccatatctgggttagcacagtgtgagacagggacagcatatggagaaagaagaaataatttgtacctgaataaaatcaacagaagcataagcttgaacttcatggtaaagaagaaaacataccaatcccgccctccagattcacagaaatcttgggtaaaggaattagtctttcacatgctgttcttatttagattttaagggaattacagaggtaaagctaagactagtactcaggttttaaaattcctaatccagtattctttctaatgcccaaacggagtattaactcagcgttacaaggacatacaggccaggagttaagatccactgagttctaagaagatttcgatgatgttgtaaaaaataatcactacaccaatgatgaaaataacatgatgggctgatatcctgtctgcaccaaaaaaaggtgagatcctgtccccaccaaaaaaagaaaaaaaaaaatcagactctcttaacacctaccagttgtctgctaaatgttatataaggagtctttgccttttgacaaaattacactattgttaggaccgattcaaattatatgaatacactgtatacatagtacatagacattcccacctacacctgatacatatttataattagaaaaattattttaaaaagcagaaaaaagtagtaggaccaggaatgagaggaatgactagaagtgtgacttagagatgttgaagaaaaagagattgttcactttgacatttattaagcatctttctttccctttcttttccttccttccttcctttcttttctttcttttccttctttctctttccttctttctttccatccctccctctctcccttccttccttccttccttctttccttccttccttctttccaggttagagttgctatttgtgaagaacatatctcaaggggaatagaagacctacaccagtcagatatcaaaagctatttatgattgagtggttcaatgtatacaatagacaggaagcattatcagaaaagtgacagattcatgtggccacaaggttaagggaaggtttcacaatggagatgagtcctaaataggaaaggcaagatagtcaaagtgatggaaagaagtgttttagggtcaaggaacaacttctgcaaaaaatctagcatcgaaacaaaactggccaactgatcatctttattaaagcagtgttttatttaagctatattgactaatatttgctatcttttataactcaatggtatttcattgcatttacattgtgccatttgtcaactcataagaattattttggcactacagtcactaagtccacttagactatcactcacctacaccataagccagtctgttttatagtgctgtataaaagtttggttcagatactataaaaatatttccattaaagggcaaatattttcactcttaaatagatactatagaaatagtttttacaatctattataagcatttataaaatgcttaacaataactcatccctaatataatgtgtaatgtatgaatttgagaggctccagttcctgataaaatataaaatcataaatatccttccctaaaactcactggtcaggaaatatgaaaggtaaccatctaaatatatctactcaaaacttttaaaccagattataaagctaagtccacctgaacccataatgggtgaggatttcattctaaggccgcaataacttcatttatggccaagtctcaactccaagagcagacagattaccaaagacattctggagatcagtatgaagcgcatcctgcttaaaccaattatgctgaaattgtcagattgcagctgacagccaatttcatgcatttcatttccatcaagttcacctaataataataacagcagaatatgaaagatgtcattacatatcattcttttggaatatttaaacgtagatggatattttacagatgacattctgtgagtcacatacagaaaagctcaacaaatgtgagtttaagaaaaaatatgttgtagtaaaaatgtggatgtaatatacatattgcttaaaaattatactttcgtgattattttctgtttctatctcattgattcatttttttaaaaactaacatgcaagtttaaatagtatatttaatctttatttcctctgcaccattttattaacaaaagtggaagataaaataatcaaggtagaagagcaattcttaatttataattttctcacctttgtactagttttaagtcacagcttctgaatggtgctctacaatagacacccaaaaaacagcttaataaatatgattggcaatcatttcatgcatccttcaggcataaaagcctgttaggaactaagagaaattcatgagctgtttctaacactgttctttacagtgcatttgcataataataaggcccaatctgttggaaaacaagtaaagggcaaattaataaggtcatcattttggtctaatgatgcttaatgcagttttagcaatctgctcaagacaaaaggtagccactcagacatagccaattatgcatttgtgtggcagatgaaatctttaatgatgaatctgattaacattcaataataaacatacaggctgagaaaatgaccaagctacctcctgcaaacatcatcaactaaggctttgttcagattgaggtcagactggtattccagaaaggcgcattaagataaaagtttatcaaatgtgttaacatgaatccccctaaaaaacccacaaaatccctattatacaaaggctacctttgcaacagctgacttgtctgatcagttatgaaaaaatagactaaactttttcatgggttgcatgtgtttaaatttttagaatggttttaaattaatttgctctgatctccaaacactgggaatatgataaaattgggccacaggagacttaggagttcagttccgttgcttcaatttttcttccaatgatccaatgtgagcaactcgaaaggaatctgttttactcatgttcctaaaatgccttggatccaatggaattcaagaattgttacttatataaataagcattacttaataaagtatggaagcagttagacaaggatatcacatatcatatcatattttattttattttattttatttgagacagagtcttgctctgttgcccaggctggagtgcagaggcacgatctcagctcactgcaaactctgcctcccagattcaagcgattctcctgcctcagcctccttagtagctgggattacagacacccggcaccatgcctggctaatttttgtatttttaagtagagatggtgtttcaccatgttggccaggctggtcttgaactcgtgacctcaagtgatcgccctggtcggcttcccaaagtgccgggattacaggcatgagccaccacgccgagcccacatattgtatatttaagacattttattgaagtatagcaaacataaagagaagtacacaaatagtaagttaaaatcgcaatagattttcactaaatgaacataccagttaacctgtagccagattgaaaaaaactgaacatcaagaaatagcatcctggaagtgcagtcactagatccctccctaccagctcactaacttgactataaagaccaaacgttaattttgctagtttttttgttttttgtttgtttgtttttttacggagtcttgctctgtcgcccaggctggagtgcagtggcgtgatcttggctcactgcaacctccgtctcctgggttcaaacaattctcctgcctcagcctcccgtgtagctgggattataggctcgtgccaccacgcctggctaattttttgtatttttagtagagacggggtttcaccatgttggtcagactggtctcgaactcctgacctcgtgatccacctgcctcggcctcccaaagtgctgggattacaggcttgagccaccgtgtccagccttttgctagtttttgaacttgtgcctcacttttttctttcaacatgtttgtgagattcttcaatatttttgagtgtagttggagttcattttcattcatggctgtggaggatgtatcatttacttgacaaacatttattatctctgtctatataaatattcatattatagaaatagtttttacaacctataataagtatttataaaatgcttgacaatagctcatcaatagtataacattaaatgtatgaatttgagaggatccagtaccttggaaaaatataaaatcataaatatccttccctaaaactcactggtcaggaaatatgaaaggtaaccatctaagtctatctactcaaaactcaatcactgctagtggtagatttgggattatttatcctttctatgactgtttctattttatagctactatgaattgtgctgctacaaacaatttgtatgtcttctggtgaacatatgtatgcatttctgttgggtatatacccaggaatattgctctggcataggacatatgtatgttcaattttagtagctactatgaaacagtattccaaaatggttataccaacccatatttccattaacagtgtaatgagaattctggctgttctacatctttaacattttctgttttcactttagccattctggtgggtgtatagtggtgttgtactatggttttaatttgcactttactgatgactactgaggttgaacgtctgttcacacatttattggccatttgaacacccttctgtgtgaagttccattcatgcctttggtccacattttgtattccatgccaaactgtaatgtcttctgaatgtggttatattaaccagcaagtaaataaaatctgagcttttattccatttttagaaatctgacataaactgaaatacagatggtccctgacttaacggtagtttgacttacaaattttcaactttatgagggtgtgaaagtgatatgcattcagtagaaactgtactttgagtgcccatataccattgtgtttttcactttcagtactgtatctaataaattacattagatagtcaacactttattctaaaataggctttgtgttagatgattttgcccaactgtaggctaatgtaagtgttctgagcttaaggtaagctaggctaagctatggtgttttgtaggttaggtgtattaaatgaattttctatttatgatattttcaacttatgatggtttatcagaatgtaactccatcataagttgagaagcatctgtacatctaaatgtttaagtttctgagcttatggtgaaactaagaaataaaaaacagcaaaaaacattattattatgcaagctagtgaagaaactcatgataataattatgttaaaggacggtatcaagaatttatcctgattttcttatttaaactgtacctctgaggaaccgaatagtagataagggaaaaatctcttctaggagtactctgtataactacataagggatgacagaattaagatatcactattttgcaactctgatgaattaatggccataggcgttgagactcaatggctgttaacatcatgaaaaaagagatactctttaatgcttcttgatggaagaacacaacctatgaagtagtcttgccaaagtcaaacctgaatctagatgaccctctagatgcaactatcaatttatggaaaatacaggtcagaggagtatgttaaactataccataggacaacaaacagcccaatccagattgtggaaaactctatagtacaaataccttgattggcttttatcaaataaataaatgcaaaaaaaaagaataaaacagatgatggagggggaccctatagattaaaagagacttaaaggatacatcaaggccagtcatggtggctcacacctgtaatcccagcactttaggaggccaaggcaggcagatcacctgaggtcaggagttcaagaccagcctggccaacatggtgaaaccttgtctctattaaaaatacaaaaaaaattagctgggtgttgtggcaggcatctgtaatcccagctactcaggaggctgaggcaggagaattgcttgaacctgggaggcagaggttgcagtgggccaagattgcaccattgtactccagtctgggcgacaaaagtgagaatctgactaaaaaaaaaaaaaaaaaaaaagacacatcaacaaatctcaatgtaggcaccttattagaatcctaattcaaaactttttaaaaccttaaagattttatactatttatgaaaagacaatttctgataatggtgaagtagcttctattagatcactgctcctaccagtaacaattgtaaattttgaattttttaaataaaaccatttttgaagtgctagagagtgatcaaaaacagaaacttcaggagacacaatccttgaaagatgtgaaacacatttggagagctctttctttaattagttttcccttcagtgaatgccccagttcatgtgtcagggaataaagctcaagcagaaagtttcagtcttacgagaatgaggaaacacaggttgaatctgagactgctagaatgactagaaattaagggaagaaatcttgggcatgattgtgccacaaagaagggaaccccaaaatgtaagtataaatatccttccaatccttggttgactcttgaacaactgtacatgtgtaaggcatgtctccaactgcccagtggaaagctgtagctgtaaggtagaaagaggtgagaagacttcagcagctgcttattgctgggaaaatagagtttggagttcaaattctactaagttagaagaacactagggctttcctattaaaccccaggaaggctactttacacgtaaggactatatcacaggactaagagcaaaatcagaatagacccattctaacaaagttgaaaatctagccttcacaagataagagctattttccagcagtgtaactgccttccagaataaaattcaaaattcttcagaggaatataacagaatctagaatatgttattcacaattttcagtatataataaaaaccagatgtataaaaaaacataaaaatgagacttaaagagaaaaaacagtcaattgaaagagatcctgagacaacccaatgttggaattgggcaagaacattaaataaactattataaacatgttaaagattttataggaaaagataaatataatgggtaaagagatgggagaattttaacagatatttgaaaactgcaacaaaaccagaactcttagagctgaataatacaatacttgaaataaaatgtttactggatgagcttgacagcagattaaaaatagcaatcaataaatttgaagatacaataatggaaactatatgaactaaagtacaaagaaaaaaatcattgaggaaaaatgagtagaacctcagtgacctgtgagacaatatcaagtggtcaaacatatatgtaactggggtgtcaactggagagagagaaaatagggcaaagtttgaagaaatattggctaaaatggtttccattttatttaaaagatctaccctcagacttaagaagctcagccaaaaccaagaaaaataactacaaagaaaatcatacctaggaacatcatagttaaactgataaaaactagaggtaaacagaaaaagtcttagcagtaagagcaaaaagttatatacaggggaatgatgagaatgatggcagacctttgtttaataacaacagatgccagaagacaacatcttcaaagttcttggggggaaaatcttgccagcttagtattttatatccagtgaaaatttcattcaaaagtgaaagtgagatctggtgtccaaagagacagcagatctgctgtctccaaagatctttgaagtcatctttcccatcctgacaacaaggaacgctgacaaaactgaaaatcaacaacttttcttagatcctccagagaattgagatcataaggccaactgttgcccccaaaattggagagagatatgggcagatatagagaatcacaacttacgacagcagaaatctctgtgggaaccaaattggggtgagaaaacttaaactgttattgataaattgccagaggcacagcatagatgagtttgagagtcaaagacttcacagggacccagttgtaggaggatccccacacttttgtgagttttacctccaagagccctactaggttatcattgttaaaaatcacaaaaatatccctttgtgcttccaggtgatggagggggaaagtagccaatttaaaatatatccagaacattctgttcttaacaaggcctgccctcaagagaaattactttatcagagcccaaccaactgggattttattagagcccaaccaatttgtaggaagagaaatacccaaattcggctccctctagcctttcacatggggggaggaaatgtccaaacatagccccaccttaatccttcctggttcacctaacaaggaaaacaaaacaaaataaaactgagaagaatttgagaagccagatacataggctcactaaaaactgagaccaaatcataagaccatagaatggtttccctcccaccaaaccttaccacatcaatagggctcctacataataacagtggaatataacttaaagaactgcacatctcagaaattatttaataaaaatagcagaggaggcaaaaccaaggataccaaaggaaattgtagcccccaacacctgcaggtacagcaaatagtaaacacaaactaacttctaaacagataaacacaaaacctaacaataaagctatttattcagttccttttaccaagtacatcatgtccaacttttaacaaaaaattataaggcatattaaaagacaaaataaaatttgaaaacagagcgagcatcagaagaggattcaaatatggcagagatattagaattatcagactgggaacttaaaacaactataattaatatgctagagaatctagtagaaaaagtgtacaatgtgcaagaataggtgaacaatgtaaacagagttggaaaccctaagaaagaatcgaaagaaaatgctagaaatcaagaacactgtatcagaaatgaaaaatgcctttggtaaactcattaatatactggacaaacagctgaagaaagaatcagtggacttgaagaaatgtcgatagaaatctccaaaactgaaatgcaaagaaaaaattacaaaaagagacaaaatataatatccaagaactgtggggcaattacaaaaggtataacatatatgtaatggggaataccaagagaagagagaaagaaccagaagaaatatttgaagcaataatgactgataatttcccaaaattaatgatagacaacaaaccacagatccagaaaagtcagagaacaccaagcagaatatataccaaaagatctatacctagggctcagcatggtggctcatgcctgtaatcctagcactttgggaggctgaggcaggcagattgcctaaattcaggaattagagaccagcttgggcaacatggtgaaaccccatctctactaaaatacaataaattagctaggcatggtggtgcatgcctgcaatcccagctactcaggaggctgaggcacaagaattgcttgaacccagggggcggaggttgcagtaagccagaatcatgccactgcactccagcctaggaagatctacacctaggcatacctaccatattcaaatttcagaaaatcaaagacaaagagaaaatcttgaaagccagagggaaaaatcatgttacctatagagaagcatggataagaattacactgcacttctcagaaaacatgcaagcaaaaagacagtgaagtgaaatatttaaagtattgaaagaaaaaaaaccaccaacccagaattctgtatccagctaagttatgcttcttgtgaaggagaaataaagattttctcagacaaacaaaaattgagaaaatttgccactagtagacctactttccaagaaatattggccaggcgaggtggctcatgcctataatcccagcactttgggaggccgaggcgggtggatcacgtgaggtcaggagtttgagaccagcctggccaacatggtgaaaccctgtctctactaaaatacaaaaattagctgggcatggtggtgtgtgcctgtaatcccagctacttgggaggctgaggcaggagaatcgcttgaatccatgaggcggaggttgcagtgagccgagatcgtgccactgcactccagcctgggtgacagttagacttcgtctcaaaaatttaaaaaaaaaaaatattagaagaaattcttcagaaaatgattcagatcagtgttgtgggctaaactgttttttgtttgtttgtttgtttgcttttcaaaattctttgtagggcctttaaagtggtaatgaagttaaaattgggtcattagtgtggaccctaatggattgtgacaagcagtcttataataagaagaaatcaagatatagacagagagagatcccaagcacatgcacacttaaatcaagggatgaccatgtaaggacacagggagaaagctaccatctacaagccaaggagagagaaatcaaacctgctaacactctgatcatggacttttagctcccagaagtgtaagaaaataaattctggttgtttaagccattcagttggtggtattttgttttaacagccctagcaaactgcagaaactcagatctacataaagaaaggaaaagcattagagaaggaataaatgaagttaaaacaaaatcttttatctttatttttcttaattgatccaacatatgcttgttcaaaataataatagcagcaatatatttagtgattatagcttgtggataagtgaaatgaatgacaacaatgttacaagtggtgggagggacaaattgggaatactctgttgctatatacttgcactacccatgaagtggtatagttttttgaaagaggatgtaaactaatcgtaaatataagggaaggaggtacaaataggtggagcatagaggatttttaggacagtaaaactattctgtatgattctataatgatggatatatgcaactatatatttgtccaaactcatagaacatacaacatctagagtgaaccctaatggaaactatagattttggctgataatgatgtcaatgttgatttgttgattgtaacagtgtaccaccctggtgtgggatgttgatagtgaaggagactgcatgtgtatgggagggggtatgtgagaactctctgtactttcctctcaattttgctgtgaacataaaactgctctaaaaaaaataaagcttatattttaaaaaccattgcctaatcccaagtcaagaagatttacctctgttttcttctaagagttttaactcctaaattcaatctcgaatccattttgagttcacttttatataaggcaggagtctaacttcctcattttgcatgtgaatatcttgttgtcccagtaccatttgttgaactatttcccccaatgaattgtcattcattcttgtcaaaaattaaatgaccataaatgtatgggtttatttcttgactcttgactctattccattgtctgtatatctaaccttatggcagtacaatactgtcttgattactgtagttgtgtagtaagtttagaaatggaaagtgcgatagttgtgttgaatctgtaaatcaatttgaggagtgctgccatcttaataatattaaatctaggctgggcatggtggctcacgcctgtaatcccagcactttgggaggccgaggcaggtggatcacctgaggtcgggagttcatgaccagcctgaccaacatggagaaaccccatctctactaaaaatacaaaatttgctgggcgtggtggcacatgcctgtaatcacagctatttgggaagctgagacaggagaatcacttgaaccaggaggcagaggttgcggtgagccgagattgcgtcattgcactccagcctgggcaacaagagcaaaactctgtctcaaaaaaaaaataataataataataataatattaaatcttttgatccataaacatgagatgtttttgttaaattcatttctaggtattttatactttttgatgctattgcaaattaaactgttttctcaatttcatttttgaattgttcattcatactctacagaaatacaactgaattttgtatattgatcttgtatattccatattgatgaatttatttattggttttaatttttttagtggattctttaggattttctacatagaagatcatgtcacctgcaagttttccttcttttatttatttatttacttatttatttgtttatttattattatttttagagatgctctcttgcccaggctggagtggagtggcatgatcatcactcactgcaggcttgaactcctggactcaagtaatcttctgtctcagcctcccaactagctgggactatgggccacaccagcatgcttggctacttaaaaaaaaatttatttggttttgcccacttctaaaaaaaatttttttagagatggggatctcactatgttgcccaggctggtctctaactcctggcctcaagcaatcctctctcctcagcctcccaaagtgctaagattacaggtactaaccaccaccaagcttggctcgcttcttcttttctaatctcaatgatttattaatttgtcttgcttaattgcctgggttagaatccccagtaatgttgaataaaagtttcaagagcagacatccttatcttgctcctaagggggaaagcattcagttttctccattaagtatgatgtaaactgtgtggttttcatagatgcattttatcagcttgaggaagtttccttttagttctagtttattgttttttcatacaaatatactagattttgtcaaatgtttattctgcatctatggaaataatcatgtagttttaatctttattctattgatgtggtgtattacattaattgattactgaattaaatgatttcaggtttgcattcctggaataaatctcacttggtcataggatataatcctttttatgttgctggattcaatttcctagtatttgttgaagatttttgtgtctaaatttataaaggatattggtctatagttttcctgtgttatctttgcctgatttggggatcagagtaatactgtcctcttagaatgagtcaggaaatgtttccttcttttatgtgttttggcagagtttgagaaggatagatattaactcttctttaactatatgtagaattcaccagtgaaaccatctggtcctgggcttttctttgagggaaggttctaaattcttaattcagtctcttcacttgttataggcctattctgattatctgtttcttcttgagtctgtttcagtagtttgtgtctttcaaggactttgtccacctcatctaagttatctatttttttgtcatatagttgttcacagtaataatcatttttatgtctttaaggatggtaataatttgactctgtttgttttaatcaagatagctaaatgtcaacttttgttgaagttttgaaagaactcttttggttaccaattgcatagcttaccttttccatcctgttactttcaatctatttgtgtttttgaatctaaaccgtgtttcttgtagaaggcatatgtgattgttttgtaaaaatctattctgctaatatctgtttcttgattggcatatttagtccattcacattttatgtggttactgataaagtaggatttatgtgtctcattttgctatttatattctatgacttaagtatcttttgttcttctatttatcaattatgatctttcttcatcctaggtattttctcgtgtaccatgcaaattcctttgttgtttcttttaccatacttttaaattttttagtgattgctctggagattacaattagcatctgtttttgtttcccccaatgtaatatcttgcaaaactgtagtatgatatcacaaccaggctgttaacagcgatacagtcaaaaagctgaacatttccatcaccccatagatctctcatgttgcccttttatagccacaccctcttaccttctacctgtacgccctccttaatccctggaaatcactatgttctattaaataaaaaatctgggccagctcatagacattttctttggctgctttttaccctgtgtattttgcacactttgctgtttatttgcatatctagtaatttttttggttgaaaactgggtattttagagaatacattgtaacaactccagtatttggttcatctctcctcaaggatttcttgaactaattgtatagattctctattccctgccactgagttctcctgaatgtgtgtgtgtgtgtgtgtgtgtgtgtgtgtgtgtgtgttttattgtttttgtttttaagcatgggtttctagcagtcccctctgggtcactataatttagtgatcagctaaagaccatcagatttcctaaaatgcttttctattatttttcaaggatatcctttgaaggcccaccttcaaactttaagcagttcataagacagccttaccttttactttttacttctgtaggacctcacagtcagctggagtgattggctggggccttctcccttccctatcttctgtgagcatgtatagcaacttattcatgcatgtagccttttagattccccaggaatatatgagagcttttcaaagttccctatgcttttctacttctccacagtttcctgttaagttcctagccagactcttgtttgtcccatctgcaagcacagccttaggcggctgtgatgttgccagaagaccagtagtgcttccatagggtcctggaggcccactgcccctgctccgtcccacccctcaactctcagttaaatcaaatagctacaacaccctgggaatagagattttccaggtagctgcaggttggaacaaagtatcgactgtgctgtgggatgttgattactcaggtacaagtgatatatctggattaaaaatatctctagaacatatctcattttcatcaataagactgccaacaatagttataaaaaccaccttcggtaaatccagaaacatcagaaacaatccattcggcacacagcacatttgcacatacaatcatttcagacttcagattctcaaatatcttcatagtttaagagaatcatttcattaaataagtttaaaaataatatctgatttttggtgtgctaatattatataagaatgaacaaaagaatgaaagtgagctatttttgaggaatgtgggtgacggttatattcaatcaacacaaataataagtgatgaggtaatttcctaacttactaatatgagtgtaatatgaatggatatgataaggcataaccataaaagagaaaaccgtatatgaaaaataattcaaatcatctggtctccactaccaaaataaaattatgcttactctcttgtctaaatttcttatcagtcaagacaatggaacaaaaaccttgttacaaaatatttattgcatttccaactgggaaaagtaaattttaaagaataaaatatacatccctgccagaacttttcagtgttcccatactgccaattttaccttccttggaagaaagataagctccatttttttcccatagagaagtattaattgtaagatgtaattcaccagcccacagagaaataatacttaactgtgttcttcctgtgagcactccattaactgtatgcttataaatggcatttcctctgaatgtatattgaaactcaccttataaaatccatagcagtgcagcctttcttgttgctaagggactatgataccacagtatttcatgatgctaaaataggaatattatagtttaaatttcatatgcctcgctatcatcagacaatttaaacaatgaaatgggaaaatgttcaacatctaattacattaattaatgttggaataatgcacgatcctgcactttcctataaaggactaagtttaaagtagtatctacattaataatatttccttatcatcattatgattattgttgttagctaatacttagggagctactacatcatgccaggcactattctaagtggtttatatgaattaactcatttaacccactaacccctaaccccatgagttaggtattatttccccattttgcacaaaaataaactaaagcacagagaagttaagtatctttctcaaaatcgtagaatttataaaaaggcggaagttgaatctgatatccaagtggtctcattgcactgtttacattcttaacggctgcactctattacactgagaaaacattttttaaaatcttaactacatttagtcacctgagatttgttttttaaagtgatgttattcaccgcacttgaagaacatacctcgtcttacccatagaatgaatatttgctgaaagtactaccatcctctgatggaattgtttacattactactataactttgaatctgcttggtttagggatgtgcaataggagtttacattggttggaaatccgatccttattttacaagactaatctttgggtcatgtttttgtctccaatgtgtattcaatcctgattaggcttaaaggagcagattaaaaacacacaaagagataagactggcttactttaacaacgcaagttttaacatataacatggaagcataacgtgtccaaatttttatgctggcatactaaatgccttttcagttttggctttgatacttatggtttaatgtcaagcatacaaaaatactacatttgggaatagttcatctttaatagcatatcatactttttttaatcaataagagaaatgggccttatggatcgtatttatctatagcatagcaatacttcatatatcttcattattacatgaggatagttatgcatgcacagccttatcttaaatttcagaacaaacataaacttacccctgattcagcaatattaaagagactggttggtctattctacactgtaagtagctgaaagaacattatttcatattccagatggcatttaaagataaacttatctccatgcttacaaaaatgtttaaaagcctttcataaaccctaaactaccagatttaacatctcaatttcacttgtaaagatctaatagaaagtagattggatgttaagactggatcgtgtttttaaaaaacattagcttaacatattcaaagggaaaatgtaagaatctttagtctaacatagtatagaagagtacagaaaataagtaaaaaaaagaaaaaaacaaagagtaacagcttacatttgcgaatgcttatgatgtaagttcattatttaattttatcctcatagacctctgtgaggtattactgtcctcactgcctggatgaggaaacttagggagcataagttaaagttagaaagcagtaggctggggtttaaaatgttcaaatccaaaactcaggctcagatcgctttggtttaatgcctccttaagaatcaaaacattttcaaaagaaaacataattccttgttttcaaataaaactatgtagaactgggaacactattaacaaatctccacattctaaaattctgtgggttatttgaagaaaatccgcccatgttaattaaatgtgaaatgatgcctttcaaaattttaacaccagttcgtcttaaaacagaacttcgattatcctataaaatatgagaatgcaatctttcccatgatagaggctataatagaaaaaacacagatcctgaagattcctattctaagagaaggctattttaaagacacttaaaaaatgcaaatatttcctcagcatgtagaaagaacaaagtaatttttcccaggcttccacatctgtgggagtagcattgttcctttgacagtacattcacaatgctaataggtgtcactgctgtacatctagtttcaagacaaaaagtttccgtatattcttcagttgaacaatcgaccaaacaatccaaattttaaaattccaaggacaacctcctttatgctggactgccgtttcaataaagtgagcaaaactacgagttttcctggaggcactgagaaccccaggtgttgaatgatttgtagtgattcgtaagtgagcatttgctactttttgtagaaattaatggtgctgtacaacagaggtacttatggcagagggaagacaatagagcaagagggaacctctcttatgcacccccacttgcccagtcttatttgggctggaattacatttgtgcatggaaatcactgtccattgaatagacagaggagtggaaactcagaatggaggagacattggatgaggtagctcagaaaaataataacaacacgaccttccacttcaaactcgtgggtatacattgaaaacaggaagaatttgtgtaataatatgactatcaatctatgtaacgttgtagttctcagaaaaacttcttagagtcttccacactgcaataagccaaaaaattcttcacaaccacatattcattttttgataaatgagtacattaccacaagaaagaatgtccaattccagaaaaaaatattgaaattggtcaaagctacaaagtactaaagggaacattattagaaccatatgatctgaccatatgtttctgcaaacatttgtaaccaaagcatgaatggtccacctttgagtgggtagcggcagggaaaatcccaagttatagttttaagtgtcttttatacttaagtgttgaaatgaacagatattatcatagaacttgttacccacaggttttaaacagtcaaaaaagagagtttaaatgaatccactgatttcaaagatggggaaataacagatgtgggtgatttgaagtcagtattctggaatataagtaatatgcttctccttggccatatcacttttaggaatgagtggagtttgttataggattatttttggatgagtgcagggcttgggataaatcataatgtatagcttagtcccttctattcaacattagaaacaggtattagcatgacaaaaatgaacatgatgaacagacttgaaagtggttcagaaactctaaaagggcatgaggcaaccggagacatttatacaaaggaaaaaggacttggggttatgggccatttgtttgtatgtaagcacccatctcactgttttttaggaacagctggtggaacccagtttcttttatcctgtaagttgcctgcatgcgttgctgctcatcctatacaaagctgagcctgccaaagcatcaatctggacttgtacgccatggaaatgttttttggagagtcattatcggaaacagatgaagcaatgcctcctgtatctaatgtgatgtctgttatttgtacatttctttgttttgtacaagttaagtttgaggtttttttcctttgcagttctttagaggaacatattttttaaagtgatttataagttacttttcatttccaaactcatttaaaaataaaaaggtaccttatttacatttgaagactttagaaagtgacaaggaggcaatgtagccattcaatacatttaccttcattcttcactgaagtctgatacaccattaatgtggtttttaaatggttaagggcaacattaaatggcattgccagtgataacataaaataacatttcttcttaggatctgtactctgactcacttaagcaatggcaaaaagattttgtgcaatttaacattcaggaagattttttggatttttatcagccctgtagtcttggaaaaagcttttataaatatttctaagagtaaaataaggaggaacatactttaaaaaggcatatcgcccatgcctatgtcctgaatagtattgcctaggtttcttgtagggtttttatggttttaggttttacatttaagtctttaattcatcttgagttaatttttgtaaaaggtataaggaagggatccagtttcagttttctgcatatggccagccagttttcccaacaccatttgttaaataaggaatcctttccctattgcttgtttttgtcaggtttgtcaaagatcagatggttgtagatgtgtggtgtaatttctgaggcctctgttctgttccattggtctatatatctgttttggtaccagtaccatgctgttttggttactgtagccttgtagtatagtttgaagtcaggtagcgtgatgcctccagctttgttcttttggcttagaattgtcttggctatacgagctcttttttggttccatatgaaatttaaagtagttttttctaattctgtgaagaaactcaatggtagcttgatggggatagcattgaatctataaattactttgggcagtttggccattttgacgatattgattctcccgatccatgagcatggaatgtttttccatttgtttgtgtcctctcttatttccttgagcagtggtttgtagttctccttgaagaggtccttcacatcccttgtaagtggtattcctaggtattttattctgtttgtagcaattgtgaatgggagttcactcatgatttggctctctgtttgtctgttattggtgtataggaatgcttgtgatttttgcatattgattttgtatcctgagactttgctgaagttgcttatgagcttaaggagattttgggctgagacaatgggattttctaaatatacaatcatgtcatctgcaaacagaaaaaatttgacttcctgttttcctaatcgaataccctttatttctttctcttacctgattgccctggccataacttccaatactatgttgaataggagtggtgagagagggcatccttatcttgtgccggttttcaaagggagtgcttccagcttttgccctttcagtatgataccggctgtgggtttgtcgtaaacggctcttattattttgagatacgttccatcaatacctagtttgttgagagtttttagcaggaagcggtgtagaattgtattgaaggccttttctgcatctattgagataatcatgtggtttttgtcactggttctgtctgtgtgatggattacatttattgatttgcgtatgttgaaccagccttgcttcccagggatgaagccgacttgattgtggtggatatgctttttaatgtgctgctggattcagtttgccagtattttatagaggatttttgcgtcgatgttcatcagggatattggcctgaaattttctttttttggttttggtatcaggatgatgctggcctcataaaatgagttagggaggagtccctctttttctattgtttggaatagtttcagaaggagtggtaccagctcctcttcatgactgaaacaccaaaagcaatggcaacaaaagccaaaattgacaaatgggatctaattaaactaaagtgcttctgtacagcaaaagaaactatcgccagagtgaacaggcgacctacagaatgggagaaaatttttgcagtctgtccatcggacaaagggctaatatccagaatctacaagaaacttaaacaaatttacaagaaaaaaaaaccccatcaaaaagtgggtgaaggatatgaacagacacttctcaaaagaagacatttatgtggccaacaaacatatgaaaaaaagctcatcatcactggtcgttagacaaatgcaaatcaggctgggagcggtggctcatgcctgtaatcccagcgctttgggaggctgaggcaggcagatcatgaggtcaggagatcgagaccatcctggctaacacagtgaaaccccatatctactaaaaatacaaaaaattagctgggcatggtggtgggcacctgtagtcccagctacttggaaggctgaggcaggagaatggcatgaacccgggatgggaagcttgcagtgaaccaagatcacaccagtgcactccagcctggatgacagagcgagacttcatcaaaaaaaaaaaaaaaaaaagaaatgcaaataaaaaccacaatgagataccatctcacaccagttagaatggcgatcattaaaaagtcaggaaacaacagatgctggagaggatgtggagaaataggaatgcttttacactgttggtgggagtataaattagttcaaccattgtggaagacagtgtggcgattcctcaaggatctagaaccagaaataccatttgacccagtgatcccattactgggtatatacccaaaggattataaatcattctactataaagacacatgcacatgtatgtttactgcagcactattcacaatagcaaagacttggaaccaatccaaatgtccatcaatgatagaatggataaagaaaatgtgtcacatatacaccatggaatactctgcagccataaaaaaggatgagttcatgtcctttgcagggacatggatgaagctggaaaccatcattctcagcaaactaacacaggaacagaaaaccaaacaccgcatgttctcgctcataagtgggagttgaacaatgagaatacgtgaacacagggaggggaatatcacacactggggcctgttggggtgagggactaggggagaaatacctaatgtagatcatatgttgatgagtgcagcaaaccaccatggcatgtgcatacctatgtaacaaagctgtacgctgtgcacatgtatcccagtacttaaagtataatttttaaaaaagtgaaaaaaaaggcatatcacaccaacaattatattaatttcctttaaaaatgctgccaattgcataaatttgttaatgtgtgtttgtggatgtatgttagccaatcagaaggcaactctatgaagaattattgcacatagtggtaacaataaaacaagtaaagatattatcattaaattctattaccaccaccaagtactgcttctcattgtgattgcatgtaaccatagaatttataaagaatgtgactgagtggctttttttttgagagagtcttgctctgttgcccagggtggagtgcagtggcacaatcttggctcactgcaacctctgcttcctggttccaagcaattctcatgcctcagcctcccgagtagctgagattacaggtgtgtgccaccacacccagctaatttttgaatttttagtagagatggggtttcatcatgttggctaggctggtctcgaactcctgacttcaagtgatccacccacctcagcctcccaaagtgcagggattacaggtgtgagccaccgcccccagcctgagtggctttttatttagtactttaatttgtttaacattttagttatctacaattgtacttttccctaagaataccttgagaaagttgagttaataagaactaagccacgttgaaaacaatgtggtgttctgcaatcaatatgttggtctcagttctaaatctctctgggccttagttactttatgtttaaggaaagtagatgacttgtaaagtattctaaaatattaaaacagtaataaaaatataacaaattgaagcagtgccaaaacaaaagcagccagtttcaagatagcatggttggccgggcgcggtggctcatgcctgtaatcccagcactttgggaggccgaggcgggcaaatcacctgaggtcaggagtttgagaccagccttgccaacaatagtgaaaccccatctctactaaaaatacaaaaattagccgggtgtggtagtgtgcacctgtagtcccagctacttaggaggctgcaacagaagaatcgcttgaacctgggaggtggaggttgcagtgagccaagattgaagattgcaccactgcactccagcctaggcaacagggcaagactcgacccccaggatgtaacttcaacacagaattttcaacaccatattaaagttgtctatttttgcttgttttctgtaccagaattgtaagtctgtacaaggtaagactgtgtttgtcactcttgcatctggcacatgccttaaaatagtaagtgcccaatttatagcactattcagttccacaaataaactaaatcatacttttttttttttttttgagatgaaggtaggtgaggtacacttaatccaagcttactatgtcaggaagacatggcaagcttccagagaaatagtgtctcaattgaatttctcaggatgttgtagtagtttgctaggtaaagaggaagggaactctgcataggtggaagagcattcaccaaggtgatggatatgaaacagcatggtccgtttttatattttagagacagggtcctgctctgccatccaggctggagagcagtggcatgatcatcgctcacagcaacctcaaacccctgtcctcaagggattctcccacctcagcctctcgagtaaccaaggctacaggtttgcaccaccacacccaactttgtgtgtgtgtgtgtgtgtgtgtgtgtgtgtatgtacagataagggtctcactatattgtccagctggtctggaactactggctacaagtgatcctcctgcctcaggctctcaaagcactgggattacagatgtgagccactgtgcttggccaacatggtctgtttttaaaataattcttaggaataaagttcacaaagggtggctaggagatgaggctggagatgttgggtaggaccagattacaaaaagcctggtatatcttcctatggagttttgacttcattttgaagactgcaggaggccaataggctgggagacaatggagggaataggtatagaaggagtaataaaatgaatgctggaaggacgcaggatggtggtcagagagaggtatattagtgctcatggttacgtgagtgaggaagttttaaggtatactcaatgtgggtggatgaaatggaggtaaaatcacaggagttgaagttaggaaactgagaattggtaattaggtagttggtaaggtgttaagaatctggaattggaagttatgacaccagggtactagtcctgactctaatgtcactaattatctatgttacttaaaacaaacctgttaagttcttcttatttttagaagattccttcttcccataaaaaaattactaagcacctactctgtgtccagaagtatatcatgctctaggactgtgtctgccctcaaagagctcatactccttaatgtgagttaatgtatcttcatttagtattattaaaatgttataagatgattctgaaaagtaagataatgaggcttgctttcagattccaagactatgcctttcataaagagattctggagaacaaaggtagatgaaaatcaatatgcaagtacaaacatatatcaacaacacactgtggcattatggactagtgtgaagagtagtatgaccttgattgtagtctcattatgtctcattttcctcctttgtaaaataaggataataccacctgtgctgttgactttggcaggctgtgttgagaatcaagtgagctaatggttgtgaaagctctatgatatatttcatgctatgcactaaagcaccacagaagatgtatttgctatgctcttgttctgttcccattaggttagttaacacagtaattcagagcagagaggctctgctctgaattcccaactggagatgggaacatcagggaaaacagcatatcctggtactccctcaagaatatatttcaaggctgggcatggtgactcacacctgtactcccaacactttgggaagccgaggcagggggattactttttttttttttttttttttttttgaggtgggatttcactcttgtcacccaggctgtagtgcaatgacatgatcttggctcactgcaacctccgcctcctgggttcaagtaattctgctgcctcagcctcctgagtagctgggattacaggcgcctgccaccatgcccggctaatttttgcatttttagtagagacagggtttcaccatgttggccaggctggtctcgaactcctgacctcccaaagtgctgggattacaggcgtgagccaccgtgcctggccccctaggtggattagttgaactcaggagttcaagaccagccagggcaacatggtgaaaccttgtctctacacaaaatacaaaaattagccaggcgcatggtggcatgagcctgtagtcccagcttcttgggtggctgaggcatgagaattgcttgaactcaggaggcggaggttgcagtgagccaagattgcaccattgcactccagcctgcgtgacagatatatagatagatagatagatagatagatagatagatagatagatagatatagatatagatataaattgcaagcatttttttcattaaaaaattaaagaaagtctgtgaggacgtttcctgtgttaagtgacttccgctgctaacttacagatcctctaccacaactattatttgtacctaccagaatatgtatacccaacaaagctctgttgggtgcctttcttttattacagctcccatcatactgtaccatattgcacaagcgtttacttgtatgcaaattaggctatgaattcctgatgaatacgatccctttcttattcaactttggtatccctagaacatagcacagttcttgatgcaaagcagactctcaaagtatgtcagatgaatgaatggattaatgaataccagctaatatggaaagctgttcttatccttaggagtcacagtgtgcaggagagacagacttgtacacaattaattgcaatatcatacagtacatattaccttgggacataggcaggaaacattaattttgtccggggtgataatgggactaaaaggcttttacaaataggctgacatttaggctaactagctgatgtgaagtcaaattcatattttagaatacaattgtgttacaataattatcttcatgagaatctcaaacaaaattgcaagagtccaacattctttttgtaggtaaatttggcaaaggaacaccctgtagaataaaaggaagagaaaagacaatctctggcccacaattgaaggagtaaaggtttagtaaacaggaatggagaaaggatggaggatttaatgtggttcaggtaataagaataaaaagtttggaatagagaaaggttgctagagtctagaaattggtcaaatgaaataggcatatgtgagggctgagaagtaaacacattaataaaatgctgaattcaattcatttggtcagcaaatatagtgttgggagtacaaaaacaaatgcagacaaaataaaaaaaaaatccctgcccttatagatcttacatagaatttttctaattggaatccatggatttcaatgttcccttgatattttcttgtttgcaatacgtacaacttttaaggtataaaatatgatatgtaaaaatagaaagtagtcataatatttaagtcttactaataaaggaataattaatttttttttttttttgagacagagtcttgctccgccatccaggctggagtgcagtggcacagtcttggctcactgcaacctctgcctcccgggttcaagcgattttcctgactcagcctcccaagtagctgggattacaggcacccgccaccacacccactaatttttttgtctttttttagtagaggcggggtttcaccatgttggccaggctgtcttgaactcctggtctcaagtgattcacacacctcggcctcccaaagtgctgagattataggcatgagccaccacacctgacctagatttttaaaaataaaaagcttaaagtgtttttcagcacatggaccaaattctaacaggtttattagccctttgaaggtgcaatttctggataccaagatatcaattatactgttgtttcaggttcctaacaattaataattgaacagtgcttcagaatttataaagcacttttacatattgaatgttaccccatttaatcctcagtaacaacgtttttatttatttatttttgcacacttttttttgggtagaaaacaaagctgaggctaaatgaggtaaagtaaaatgaccaagttttgcagggcaaaactcaaactcattcccttgaccagctagtccaaaagagcttccatatactcttctgcacttgattctcatgtttgatctacttcttattatccccattttaagatgaaaaaacagaagttcagagagattaaataacttgcccaaagtaagttggcaggtggagctggaacatatttccatgtctaatggtaacaaaattcatgtatattgccaatcaactttaaagacaaatatagaaatattaatatatcaacttactttattgtaatttttatttttaaaatgttttaaagagatgggatctcgctacattgcccagatagtgcactgcaccctcgatctcctgaactcaggcaatcctcatgcctcagcctcctaagtagctgggactacaggtgtgtgccactgtgcccagctttactttattgtaatgtatattaggtgagcttataatctaaataattccttagtttaaggttatgcctatctccaacaatgatactaaaaaatggtacaaaataagcttttatagttcctacttgctcctgctttaggtaataattcaactccataagcaataccataaagtgctgactagcaaggcaggtccgtgggtgctttcacaacagataaaaaagattaacattttgaaaggatagttaactttaaatatgaataccataacatcagttagacaaacagggaagaagatggccgaataggaacagctctggtctgcagctcccagcgtgatcaatggaaaagacaggcgatttctgcatttccaactgaggtacctggttcatctcatttggactggttggacagtgggtacagctcacagagggcgagccgaagcagggtggggcattgcctcacccaggaagcacaaggggttgggagatttcactttcctagccaagggaagccgtgacagactgtacctggaaaaaacaggacactcccacccaaatactgtgcttttcccacagtcttagcaaccggcagaccaggagattatctcctgtgcctggcttggcaggtcccatgcccacggagccttgctcactgctagagcagcagtctgagatcaacctgcaaggctgcagcctggctaggggaggggcatccgccattgctgaggcttgagtaggtaaacaaagtggccaggaagctcaaactgggtggagcccactgcagcccagcaaggcctgctgcctctgtagaccctacctctgtgggcagggcatagctgaacaaaaggcagcagaaacttctgcagacttaaacatccctgtctgacagctctgaagagagcagtggatctcccagcacggcgtttgagctctgagaacggacagactgcttcctcaagtgggtccctgacccccgtttagcctaactgggagacacctcccagtaggggccgacagacacctcatacaggcagatgcccctctgggacgaagcttccagaggaaggatcaggcagcaatatttgctgttctgcagcctccgctggtgatacccaggcaaacagggtctggaggggacctccagcaaactccaacagacctgcagctgagggacctgactgttagaaggaaaactaacaaaacataaaggaatagcatcaacatcaacaaaaaggacatccacaccaaaagcccatctgtaggtcaccaacatcaaagaccaaagatagataaaaccacaaagaaggggagaaaccagagcagaaaagctgaatattctaaaaaccagagtgctgcttctcctccaaaagatcgcagctcctcaccagcaatggaacaaagctggacggagaatgactttgacgagttgacagaaataggcttcagaaggtcggtaataacaaacttctctgagctaaagaagcatgttctaacccatcacaagaaagctaaaaaccttgaaaaagggttagacgaatggctaactagaataaacagtgtagagaagaccttaaatgacctgatggagctgaaaaccatggcatgagaacttcgtgacgcatgcacaagcttcaacagctgatttgatcaagtggaagaaagggtatcagtgattgaagatcaaattaatgaaataaagcaagaagacaagattaaagagagtaaaaagaaacgaacaaagcctccaagaaatatgggactatgtgaaaagaccaaatctacgtttgattggtgtacctgaaagtgacggggagaatggaaccaagttggaaaacactcttcaggatattacccaggagaacttccccaacatagcaaggcaggccaacattcaaattcaggaaatacagagaacaccacaaagatactccttgagaacagcaaccccaaaacacataattttcagattcaccaaggttgaaatgaaggaaaagatgttaagggcagccagagagaaaggtcaggttacccacaaagggaaacccatcagactaacagcagatctctcggcagaaaccctacaagtcagaagagagtggaagccaatatgcaacattcttaaagaaaagaattttcaacccagaatttcatatccagtcaaactaagctttataagtgaaggagaaataaaatcctttacgaacaaccaaatgctgagagattctgtcaccaccaggtttgccttacaatagctcctgaaggaagcactaaacatggtacaaccagtaccagctactgcaaaaacatgccaaattgtaaagaccatcaatgctatgaagaaactgcaacaattagtgggcaaaataaccagctaacatcataatgacaggatcaaattcacacataataatattaaccttaaatgtaaatgggctaaatgccccaattaaaagatacagactggcaaattggataaaaagtcaagacccatcagtgtgctatattcaggagacccatctcacgtgcacacataggctcaaaataaagggatggaggaagatctgtcaagcaaatggaaagccaaaaaaagcaggggttgcaatcctaggctctgataaaacagaatttaaaccaacaaagatcaaaagagacaaggtcattacataatggtaaagggaacaattcaacaagaagagctaactatcctaaatatatatgcatccaatacaggagcacccagattcacaaagcaagtccttagagacttacaaagagacttagattcccacacaataataatgggagactttaacaccccactgtcaatattagacagatcaacaagacagaaggttaacaaggatatccaggacttgaactcagctctgcaccaagtggacctaatagaaatctacagaactctccaccccaaatcaacagaatatacattcttctcagcaccacatcgcacttattccaaaactgaccacataattggaagtaaagcactcctcagcaaatataaaagaacagaaatcacaacaaactgtctctcagaccacagtacaatccaattagaactcaggattaagaaactcactcaaaaccacacaactatatggaaactgaacaacctgctcctgaatgactactgggtaaataacaaaacgaaagcaggaataaagatgttctttgaaaccaatgagaacaaagacaccacgtaccagaatctctcagtgtgtagagggaaatttatagcactaaatgcccataagagaaagcaggaaagatctaaaattgacaccctaacatcacaattaaaagaactagagaagcaagagcaaacaaattcaaaagctagcagaaggcaagaaataactaagatcagagcagaattaaaggagatagagacacaaaaaacccttcaaaataagtcagtgaatccagagctggtttttgaaaagatcaacaaaattgatagaccactagcgagactaataaagaagaaaagaaagaagaatcaaatagatgcagtaaaaaatgataaaggggatttcaccaccgatcccacagaaatacaaactaccatcagagactactataaacacctctatgcaaataaactagaaaatctagaagaaatggataaattcctcgacacatacaccctcccaagactaaaccaggaaggtgaatctctgaatagaccaataacaggttctgaaattgaggcaataattaatagcctgccaaccaaaaaaagtccaagaccagagagattcacagccaaattcaaccagaggtacaaagaggagctggtaccatttcttctctaactattccaatcaatagaaaaagagggaatcctccctaattcattttatgaggccagcatcatcctgacaccaaagcctggcagagacacaaccaaaaaagagaccaatattaagtaggaattttccctatttaataaatggtgctgggaaaactggctagccatatgtagaaagctgaaactggatcccttccttataccttacaccaaaattaattcaagatggattgaagacttaaatattagacctacaaccataaaaacactagaagaaaacctaggcaataccatttaggacataggcatgggcaaagacttcatgaccacaacaccaaaagcaatggcaacaaaagccaaaattgataaatgggatctaattaaactaaagagcttctgcacagcaaaagaaactaccatcagagtgaacaggcaacctacagaatgggagaaaatttttgcaatctacccatctgataaagggctaatatccagaatctacaaagaacttaaacaaatttacaagaaaaaaacccatcaaaaagtgggcaaaggatatgaacagacacttctcagaagaagacatttatacagccaacagacacatgaaaaaatgctcatcatcactggtcatcagagaaatgcaaatcaaaaccacaatgagataccatctcatgccagttagaatggtgatcgttaaaaagtcaggaaacaatagatgctggagaggatgtggagaaataggaacgctttcacactgttggtgggagtgtaaattagttcaaccattgtagatgacagtgtggcaattcctcaagtatctagaactaaaaataccatttgacccagtaatcccattactgggtatatacctaaaagattataaatcatgctactataaagacacacgcacatatatgtttattgcggcactattcgcaatagcaaagacttggaaccaacccaaatgtccatcaacgatagactggtttaagaaaatgtggcacatatacaccatggaatactatgcagctataaaaagggatgagttcatgtcctttgcagggacatggatgaaactggaaaccatcattctaagcaaactgtcacaaggacagaacaccaaacaccccgtgttctcactcataggtgggaattgaacaatgagaacacttggacacagggtggggaacatcacacactggggcctgtctgggggtgggggtctgggggagggatagcttaggagtaatacctaatgtaaatgatgagttgatgggtgcagcaaaccagcatggcacatgtatacctatgtaacaaacctgcacgttgtgcacatataccctagaacttaaagtataataaaaataaattaattaaaaaaataaaaatacaggaaaaaaaagaaaaacagggaaaatatacgaagacaatactgcatctaaaataataacaaacagtactaaatacttttaaaacttttcaactatatgtgaatcatatataaaagataatggcacctagtttacagaaatggtatgcctcttgtacaattttgtgttttataatagcaaggagccaaatcaaactttaatattgaattctataaatattaatgtaaaatattttcatgtgaaatgatgaaattttggggaaagcgttaagataatcaaaataatataaattcccgaataaaggaagactgagccaagaaaatacaaagttattataaaatgtactaaaatatctatctaattatgccttgttacacattccttttaatcagtatttaccattgggttttcaaaggttaatttctgggaacagtaaatttcatatagcttttgttttctttccaatacattgacgcttgtttattacagagtggaatttggtgtaagatgggttgttttggacctggtccaagagggtttagttactgaaagcacctcattataaggtagtcttaccaataaggtgatctgctggctcagatcccatgtatattataacaaggctccattgtggagtacaggaagccaggcagctaatggttctatcaaatgaaacttaagaaacaaaattctttttttttttttttgagacatgaaaattgtttaaggctagaggatcataagccttggtcacttttccaaatttctatttcctgatgttctttattgtatttttcatagctctgcagttattttacgttaaggttttagctttcttacattcattgcttgatctggtcttaaaattttttttgattatcatcaatactatctatttacaaaagattaactgcatttacctatggaaatagataataaaccaccaagaattcataaaggttaaattcttgtgtaactcattgagaaatcagcgtttaaaagagcatatgcgagaataattgtgtggtaatcaaatacaaaagaatgccatcacttagagatgaccatgataaccagcctttcaagtgatttgacaacaggtgctttgatttcatgaaattttgtaagcagccctaaagaattaaatattttaaatgcgttttaatataggaaagtaatacaaaaaagtccagttgcagaaaaataacggggaaaagctttttgttaaaattaatgttttgaatagaaagatcttaacaacaaagccttatagaaacttagaaacagtgccaaatttaaacccatgtaataactaagtgcatagaaacatagtaatagttttataacacaattctagacagttttaaataatttaatcaagtcatgaaacatctactctttacattgtacctttattccaagaataaagccctgtctctaactggtagttttcctggtttgcagcctgtgtgctctatatactttcagtccttgaataaattcagtattagataattatttcatatgcattgaatgtgtcacataaattatttgataaacaatctctaccttatacatctcaaaagcttaaaaaataagccagccaaataatttttctttcctcaaatctttattgtcagtctatcacctatatatctatagttagggaagctttcatatagagcaagggtgcactccagatatatgattcatctactaattaataatgaataacttgcaatgtgccaggtgctcttttaaaagcatttagatgttttaacttatttaaatctgtaaacatttcttttaaaagtatgttatcagtaatgaaaatggcctacatcctactctataaaggccagtagtttacttcttggaatatcatcttggtcagtcatgatctgaggagaatatacacctgtttcaacagtgattatcattgtataaaatttttgaaacaccttttggaattactaaagggttgtgacacatctctatgtacattctcagtaatgaaaatttttaacttcagggagaattaaattttggaaagaataaaaaatatctaggccaggcatggtggctcacgcctgtaatcccaacactttgggaggccgaggtgggcagatcacttgaggtcaggagtttgagaccagcctggccaacatggtgaaaccctgtcgatacttaaaaaaaaaaaaaaaaaaaaattagctgggtgcagtggtgtacacctgtaatcccagctacgcaggaggctgagacatgagaatcgctttaacctgcgaggcagaggttgcagtgagccaagatcgtgcctttgcactccagcctgagcgacagagcaagactgtctaaaacaaacaaacaaaaacatatctagctagggaaaggggaaagtattggagatgaagttgggtaataacactaagatatgaataatatgcttaattttctcatgtagtttaccaattctaaaggtaatttctttttttttttttttttgagacggagtcccgctctgtcgcccaggctggagtgcagtggcgcaatctcggctcactgcaagctccacctcccgggttcacgccattctcctgcctcagcctcctgagtagctgggactacaggcgcccgccaccacgcctggctaattttttgtatttttagtagagacggggtttcaccgtgttaaccaggatggtctcgatctcctgacctcgtgatccgcccgcctcggcctcccaaagtgctgggattacaggcgtgagccaccgcgcctggccctaaaggtaattttaaaagtcctcaaaatgttttaattgtagcattgcgaaaataaatatctagctttccaagttattatgcacatataccatctgtgtcagtctgttctcatgctgctaataaagtcatacccaagactgggtaatttataaaggaaagaggtttaattgactcacagttctgcatgactgaggaggcctcaagaaacttacaatcatggcggaaggcaacttttcacagggcagcaggagagaagaatgagagtgaagcagggaaaagctccttataaaatcatcaggtctcataagaactcagtatcacgagaaccgcatgagggtaaccgcccccacgattcaattacctcccactgggtccttcccacaacacgtcgggattatgggaactacaattcaagatgagatctggctggggacatagccaaaccacgtcaccatcgttccctaaatgtaaatgagtaagagccactttactttttaaatgaaataatatgctttattttaaccgttctggaacaaaagcaaatgaaaatcgactcagaatatcaacagacattcctttatagattctcaaagcacaaagaaatttgtatgattttatagtactaaccgctgcattttacagatgaaactaattccctgaagggtgtggtgattgccaatatgacttagcaaatcagtggcagagccaggtgtagagcccaagtctcttgtcttctaccaggtatttattcgtttcactaccctactatccctatctgtggtttaagaataataccagaggagataaattgtttcaccctttcaaaacaatgtaaaaattaccttctaatcgagtatttggtatttactgctcaatgatcaactagaaaaaatatataatactagatgggatctaatatattctaaattctttaactggtaacttgtcaatttaaatgtctttgaactacgcttagagttgtaacatcaaatgctatagaaacaggctgtaaaaatctaaatgtctcaaaatggaagcaaagacatacctatataatgattcatttatccaaatgaaatgtaaagtaaatccttactggaaattttgacttgaaaataatagaccatacagaattcttggatagctcataaaatttcaattcaaattactcacaaaaagtcccaatgcccagtgaataacagatgtttcttaaaaagagatcaatgaatgtatttttggaatgatgtcagagatgagcctcttttataatcatttttgattagacatatagcttcattcacaaaaacacaaacaaggtcaaaattcacagaaaggattactgtgccctaaggaaacatattttagctgcagctataaatgtgggtttgcttatcaaatttatatatgaagttttctatcttaatcattgtataactaaagcttatgctagaacaataccagaggggataaattgtttcaccctttctaaacaatgtagaaattaccttctagtctagtgtttggtacttattactcactgatccactaggaaaaatatataatactaagcaggatctagtatttttttccacaatgatggtgaagctaaataattagaatagaaaatttggaatacttcatttggcattttatatctttacgtcaatttgtttatgacatgtttggttttaggtttattatacaaagaatgtaaaacaatttcaattaaaaatgcatactactttcttaatttctcttaattacttataagtaggcagtttaataacgaaataaacctttcaagacaaatggtgatctctgaaaaagtcttggactgatttgaggtaaaatctatagcgaaatatgactgaggtgtcactagattagactgctgttaatttttatgtatcagtgtgaaaacaaatggatgaagagaaccacctaatatgaatatttacgtgaaactagaagtgccctaggatctttgaataattttaaattgcatttagctaaggaagacttatttgaggacagtactttgtatgaattactttatcaaaactcaagaatgggccaggcactgtggctcacacctgtaatcccagcaacttagggaggcagagaagggcagatcacgaggccaggagttcgagaccagcctggccaacatggtgaaaccccatctctactaaaaatacaaaaactagctgggcatggtggtgcacacctgtagtcccagctactcagaaggctgaggcaggagaatcacttgaacctggaggtgaaggttgcagtgagcccagagcacaccactgcattccagcctgggcaacagaccaagactctgtctcaaaaaaaaaaacccaaaaactcaagaataataacatttacatttctgaacataaaatagttttttaaaaagtatgccacttattcaatttacaaattattacttacaacagagtttaacataagcatgatgacatatttttacttagcttgagagttaagtattattacttaaaaccaggaaacatgcctttatttttggaaggagatggtttaaagttctttatttctatttcatgagtttttcccagttccagttcatttatccaagttgtttttacattaccatcaatgtcatcaattttactttcttcaatatgcagaattccattcaactttgtatctatgcaatcctcagctttcacttctctggctgaatctacttcttttatagttctaatttcaaaaaggtctttagctaaaatgcaatctgaattgttagccaatctatttcctctatcagtttcagctaggtcatttttttcttcatctgtatcttcaggatcataaagttcaggtgtaaaatagatagattcatcttctgcttctgtttcaaaatctctatttgaagtggactgtttatcttcttcacttactagagacaattcaatgtctggatccagggcttcttcagaacagagcggatgttcagaatgattttttctagtaagggtggcatcaatctttaatgatgaaataatggtttctgattgagggcatgatccaaacgatgtgtttactgtcagatttgaggattcacatttatcagtgaagggcaaaacagttttactttccatcttctctgttttgaaacggggaggactagaggcactattctctgatgacccgagctcaggtgttgccttcggtattttaccagtaaaatactgtcccaaagaattaaagcttgaccagctaactctctttgtttgtttgttgaaagttgggcttgtggatctggaaatcacaattttttctgctttccctgcttcttccaggaatactggatcatctaagaatacaagaatttaagagatttaactttctgctcctagctaacataattgctaggttaaaataattatttattagaaatacctaaataactgtataggatacataacttagagcccccaacgaatactagtggattttcatcttggaacagaatattaactctgaaagaaatcttaggtctctaatgtttcctagcccaagttataatgctgtctggtaaactatcaaattccacagcagggagctcaagaatgaatgaggaaagaaggggtaaaagggaagaggaagggagctgaggaaaggagggaacaggctgtaaacatttgccttgaaaatccactaaccagtgactgagaaaaacttacctagactaattcttttatttaataaataaggaaagtgacataaggctaagttatttgctcaaagttataaaactggttagtaagaagaccaagactagaaactaggtttcctgattaccaagttaatcggcttgaattcactatttatagtgaattttgtattactattttgtagtatttatatacaaaattgtattactattttgtagtacttatatactacaaaatacatgtttaaaaattgatgtttttcttttttttagtccgagttttgcttttgttgcccaggctggagtgcaatggcgcaatcctggctcactgcaacctccacctcccagttcaagcaattctcctgcctcagcctcctgagtagctgggattacagacagctgcctccacacccagctaatttttgtatttttttagtagagacggtgtttcaccacactggtcaggctggtctcggactcctgacctcggatgatccacccgccttggatatatgaattaaaacaactgaaattatatccaatggaatagaccagagtttggcaaaccttttctgtcataggccagatagtaatatttaggctttgtggagcataatgtatctgttgcgactactcaattatgctgttctagtgcaatacacacaaatactcaactctgctgttgtttctaaaatgtaaataaatgggcatgactacatttcattaaactttatttacaaaaacaggcagcaggccaaatttggcccatgggccacagtttgccaatctgatacagatgattatttcaaaatattttaaaatattatttttcatcacttaaaataaatgtctctcacctcctaaaaataagttcataagaactatctatataggaaaagtagttcatatagaagtatctacataaaaattaggccaaatttttatatagcctttagaataacatctaccacttacatggtactttacaatgctgtgatatttataattttgacctttacaacccaacctgaagggatagctaggcaggcattttttttttcctattacgactcaaaaaggacaaatgacttgctcatgatcacaaagctagtaagtggcaaagccagttagtggaaaaccagaaaatatgctctggtctcctgacaaaagtttgttcccattacagtacaccatactgtttcactattttatgataacaccttatattacaaaccaccatatttaaggaattaatctatacccaaataaatatcatttcactaaatataatgaaagacttctctatcaaaggtaaatgggaagaacttttcatacttttctcctttctggagataatgctacttggtagaggtgaatttttggtaataattttaggacactgtagttcctggacacatatctttgcttcatcttccacaaaattttctggtgatagatgacttgctgcttccagtaaataaggtgaggtactgtactttaaagaggtcacttcaagtgtagactcattgtcctgtatattggttctgtcctttatggatacattaagaactttttgatgctttttggaaaattcagccaaggattccagtgcactttcaaaggttgaatggtgctgaatctgctgccgtacccatttagaaagtcctaaagaaaaaggtaaacccagggaaaatttggttacttagttattaaaatattacatgctaaggtaatacacttgctttttctagtgaagtaacctaatttgtattttgaatatacagaatggttctccatatgttttttctgcaattcagcaattttactacatatgtatcagtaacatatgagtaacattctctttatatacagtaattgtcaaatggagagagcaaagaggcagtagaagtagggcagagatgggaaaacatattctctggttaagaataactggtgaacatggcaaatttaatttcatcataattccccacaaaaattgccttttttttttgtagggaaactagaagttgtaaacaatacaactttccattctaatattctaaattttactccttttgcaaaaataatttcaagattctagtctcaagtttttttgttcccttcctccaccaattccaaatatatcttaaattaaaattattctggaggtgaaataaataacactgtcttatgggtaaatcacatcccttctgaatttttatgatataattatttttaatatataatcaagttataaaggatatgatttgacctgtgacataaaaactgcacaaaaatgaaacctaagagtttaaggtgttttctagtatggtgtgcttccaaatgaaatgcaaaatcaggtatttggacttttacaaaataaatattccctgctaacactactaaaactagcatcatcttttggaggaattagttttaaaagtcactatagggtaaaaatttaagttctagattttaaaactaaaaaaattttaaataagccatttcccttgaagttttttattttgttcatttggggaatatgattagaccataaaaatatgtgaaattctctaaaattgaaaatttttaggctgagtgtggtggctcacatgtataatcccagcatttggggaggctgaggtgggaagattgcttgaggccaggagttcaaggtttcagtgaactatgatcacgtcactgcactccagcctgggcaacagagtaagacctgtctctaaaaaagaaataagtaaataaaaataagaattttagtactatatttacctcttcatttcaacctttttataatcaaagaaagccttttcaatgtaaaatatcattgtctgcttttgaaaacttgaaagaatctgagctccacctgctgactagacaccagcacttagcatttttgcctttagttactgtttgacctatgctactgcacactttacgtggaaagggaagataaaacaaataaagcaatattttctgctttatgttttaatatcaaaccaaatacagtcattaagctctgaaattgaaaaggtagagtctacacccacacatggctaatctaaaacaaaatttaacatctctttattataataaaatgtattttttttttagctaaaaggtaataataaagatacacatgtatcccatagctctttagtaatcactcctggtattgactctgaaaactgtttactgttggatgaaaccatcgagtgagaaaaaaatgatactactgcctgcatcaaagcggtaggaaaatttgtggcaccctcttgtcatgatccccacttcagaatatacctggctgcttcttcctggggagaaaagagaaaactggaccttatgtctttttctgggaggctgccccagggactggcttctatcttacctgtactgaagagctgacatgagctggcataccctacatgcccaggggccactaagaacaaaagcgctgtgcagcaagtttctgctccacaggaaccacagtgcaacagaggcccatatagtttgatggccactccctcagggggacagaaaagcctggagtgtgcatccaacatcttggcttttcaaggagctgtctagggactcgtttctgtcttgcttgtcatagagtactgactggacctagcatactctgtatgcctggaatctactaagaacaaaagagagtcaggcgtgatggctcatgcctgtaatcccagcacttagggaggccgaggcaggcagatgacttgagcccagagcccaggagtttgagaccagcgtggacaacatggtgaaaccccatctctacaaaaaatacaagaattaactgggtatagtggtgtacacctgtggtcccagttacttgggagactgaggtgggagaatcccttgaacccaggaagccgaggctgcaatgagctgagattgtaccactgcactccaacatgggcgacagagtgagaccttgaccaaaacaaaaaaaaaccaagcaaatatttctaataaggaatttacagagaagtccaaagaagacagatccacggaaaaggtttgagaggctcccagaatgcctaccagggctgatgagtgaaggtctttccctgtacaaaaccagttagtaaacactgtgagaggtggctgttttttcaaatgtgtggataccatacaaggttacaagaaacataaagaaacaggaaaaaataaccctgtcaaaggaacaaaataagtctccagaaaccaacccttaaaaaaaaaaaaaagctatatgaattacctggcaaggaatttaaaataactgtcaacatgatgctcacaagttcaagaaaataatatagaaaaaaaggagaatttcaacaatgataaagaatacaaaaaagaactaaagagattttggagctaaaaaatgcaataactggactgaaaaattcactacaggggttcatcagcagacttgatcaagcagaaggaagaatcaggaaatttattttattttactttattttatatattttatattctgttatgttatgttatgttatgttatgttatttttttgagacagtctcgctctgtcgcccaggctggagtgcagtggcgccatctcggctcactgaaacctccgcctccctgattcaagcgattctcctgcctcggcctctcaagtagctgggactacaggcatgtaccaccacacccggctaattgtcgtatttttagtagaggtggggtttcaccacgttggccaggctggtcttgaactcctgacctcaagtgatccaccttcctcagcctcccaaagtgctaagaatcaggaaatttgaaggcaagtcgtttgaaatcatccagtcagggaagcaaaaagtaaaaaacaaaatggaaaaaaaaaagtgaaggcttatggcttcatttatgacttgacttatggggcaccgtcaagctgaccaatatacacattctgggagtcctagaaagagaaagagagaaaggagcagaaagcttatttatagaaataatgaccgaaaacttaataaacctggggggaggaaaatgacatccaaatacatgaagcccagtgaacctgaacaggatgaacccaaaagtctgtaccaaaacactttataatcaaagtgtcaaaagtcaaagaaaacaatagaaatttgaaaacagcaagataaaagcaacttgtcatatacaaatgaagtcccataagacagtcactaggccgggcatgaaggctcatgcctataatcccaacactttgggaggcagaggtaggagaattgcttgagccgaggagtttgagattagcctgggcaacatagtgagaccccatctctacaaaaaaaattaaaaattagccaggtctggtggtgcatgcctgtagtcccagctgaggctgaggtgggaggatcacttgagcctgggaggctgaggctgcagtgagtcatgatcatgccactggactcctgcctgggtggcagagtaacatcctgtctccaaaaagagaaagatttctcaggcgacatcttgcatgctgtaaggaagtgggatgacatgtttgaagtgctgaaagaaaaaaacctgccagtgaaggatattatatctggtaaagccatctatcaaaatgaataggaggtaaaaacttttccagataagcaaaagctgagggacttcaccactaaacgtgccttacaagatatgctaaaggaagcctgctaaacagcaacacaaaagcataaagtttgctcgtgaagttaaaagtgtacacaaatacagaatactttaatataacaacagtgatacataaataatgtttaattctatacagaagttaaaagacaaagtatgaaaataactataatagtatgttagtggatacactatataaaagggtataatttgtgactttaataataaaatgtgatgggaaaagtaaaagtgtagagtttatacaactgaaatgaatttgttagctgaaaatattgttataactatgtttcatgtaagacccatgtaaccacaaaggaaatatctatagaaggtatacaaaagaaaaatgagaaaggaatcaaagcatttttcttcaaaaaattaaaaaatgaaaagcttttaagaccagcaacaaagcaaggatgttcattctcactacttctatttagcttagtactaagaatcctagccagactattaggcaagaaaatgaaataaaaggaatccaaattgaaaaagaataaagtgaaatgatctctctttgcagatgacatgatcttttatgtggaaaaccctaaagattgaaaaaaaacctgttaggactaataaatccagtaaagttgcagaatacaaaaatcaatgtacaacaatcacttgcaattctatacactaaaaacaaccaaaagaggaatgtaagaaaacaatcccatttataatagtatgaatgaagctggaaaccatcattctcagcacactaccgcaaggacagaaaaccaaacatggcatgttctcactcataggtgagaactgaacaatgagaacacttggacacaggaagggggacatcacacaccggggcctgttgtggggtggggggagaggggggagggatagcattaggagatatacctaatgtaaacgacaagttaatgggtgcagcacactaacatgggacatgtatacatatgtaacaaacctgcacgttgtgcacatgtaccctagaacttaaagtataataataaaaataaaaattaaaataaaaaaactcaaaccagggaaaaaaaatagcatcaaaaataataaaatacctaggaataaacaactaaggaggcaaaaaacctgtacactggaaattataaaacattgctgaaaaacagtaaagataacacaaataaatggaaagatatcccatgttcacagattggaacacctaatattgtcagaatgtccatactactgaaagcaatctttttttgagacagaatcttgctctgttgcccaggctagagtgcagtggcgcggtcttggctcactgcaacctccgcctcccaggttcaagccattctcctgcctcagcctccagaatagttgagattacaggcacccgccaccgcacccggctaatttttgtatttttaatagagatggggtttcaccatgttggccaggctggtctcaaactcctgacctcgtgatccacctgccttggcctcccaaaacactgggattacaggcgtgagccaccatgcccggctgcaatctaaattcatatggaaccacaaaggaccacaaataggcaaaagaaccttgagaaaaatgataaaagctgcaggcatcatacctcccgattataaaatacattacacagctgtagtagtcaaaaaagtatggtactggcataaagagaaccatataagccaatggaacataatagagagctcagaagcagatccacacatatatggtcagcggatcttcaacagggtgtcattggggattgatatgctttggttatttgtttcctccaaagctcatgttgaaatgtgttcccccatgtcataggtggggcctagtgggaggtatgtgggtcatggggacagaaccctcatgaaagccttggtgctatgattgtagactttctgaggtcctcattagaagcagatgctgatgccatgattcttgtgcagcctgcagaaccataagccaaataaatctcttatctttataaattatccagtcttggtattggcaatgattgtttggatatgacaccaaaaacacaggcaataaaagcaaaattagacaaggaagaccatgttaaactaaaaaacttctgtgcagcaaagtaaataatcagcagagtcaaaaggcagcctatagaatgggagaaaataatttgcaacgcatatatctgataaagagttaatccccaaaatatataagaaactcctatatctcaatagaaaaaacaaacaaaaaaacacaccaaaaaccaaaccaaaaaaacagatatgcaaagaaatccaaataacccaattaaaaaatgagcaaatgaaaagatgtttctccaaagaagacatatgatttggccaacaggtatagaaaagatgcttaacatccctattcatcagagaaatgcaaatcaaatccacactgtgctatcacattatacctgctaggagagccattatgaaattttaaaaagaaaaagaagaaaaaaggaaataagcattagggaggatatggagaaactggaacccttgtgtgctattggtgggaatgttaaatggtgcagttgctatgaagaacagtatcaaatcaaaaaattaaacttagaactatgatgattcgccaaatcctacgcttggtatttgttcaaaaaaattgaaatcagcatcttgaagagatatctgcattcccatgtccattgcagcattgttcccaatatccatgagggggaaacaacctaaatgtctactgacagatgaatggataaagaaaatatggtataatgtatacataaaataaaatattaagcagtcattgaaaagaaggaaatcctgcaacatagatgaaccttgaggacattatgctaactgaaataagccagttacagaaggacaaatactgcataattcaatttatatgaggtatccaaaacagtcaaactaatagaagcagaaagtatagcggtggttgtcagtggacaggggggagagggacatggggcattgctgttcagttggtgttaagtttcagttatgtaagatttaaaagttctagatatctgctgtgaaatactgtgcttatagttaacaatattgtactgtgcacttaataagatagtagagctcatgttatgtgtttttcaccacaataaaaatatgaagattgttactagtttttactctaagcccagctgagatcttaccagatatatagcgacttgggttattcctaaagcgatcatccactagaataagagctccccaatcatttctgtgtctaatacatctagaaaaaatagggaaaaagtcaaataattataacatcggaaataaatccagttttccagtgggacagacagaaaattggaaaaaaatcaattttatagattcctttaaacaatttgttattatcagaaaagttacagaagctatccaacacaatgtaacaaactagatgtattaaaaattccctactttttccaaatacagataacttgcatccaaaatgttgtattttattttgcactcaagaaaattatagaaaatatattctaagatctttcttagccacatagactgttttcttttttttaccttaagtattataaataattgtaaaggtcctttttactagtttgatgagagttttaaatcatgaataaacatttaattttgtcaaaaatattctaaaattcaattgacataacatgtagtttttcttcttttgactgttaatatggtagattacactggttcattttcaaacactgaatcatccttgcattcctagtcatggtgtattattctttttatagattgttggattcaatttgctagtttaaaaaaacacattaaaaataaaaacatactttttaataattattaaacaattttaaagtgcacaatgcaatggtttgtggtatatttacaaggctgtataacctataccacttatctatcccagaacattttcaccaccccaaaaagaaaccctgtgcccactaattgttactccaaattatcccaattattccccattacctctggcaaccactaatctttctgtccttagagagttgccaattctggacatttcatttaacgggaatcagacaatatgtagcattttgtatctggcatatttcactgaacatgatgttttcaagattcactcatattgtatcatttctcagtacttcatttataagttaatgtttccactttttggctagtatgaataatgctgctattaaacatttgggtacaagtttttatatgaatacatgttttttattctcttgggcatacacctagaagtggaattggggagtcatatagtaattctatgtttaactttttcaaacactgccatactgttttccaaagcagctgcacattttacattcccaccacctacgtacaagggttccaaaatctccacatcctcaccatcatttgttattgtatacccttctaaaaatatatctaccctagaaagtgtgaaataatatttcattatggctttgatttgcatttccctaacaaccaatgatgttgaacatcattttttacgtgcttactggccatttgtgtatccttttttggagaagtctgttcaaattattggtccatttttaatggcccattttgtctttttattattaagttgtaagagttctttatatattctggatactagatcctgctacacatgatttacaaatattttctccatatgtgagttgtcttttccatttcttgatactgtcctttgaagaataaaaatttgaactgtaacaaagtccaatttatctgctttttctttggttgcttgtgcttctgatagcagatctaagaaactattgcctaatacaaggtcaagaaaatttatacctctgtttttgcctttttctgtctttgatccactttgagttaacttttgtatatggtgtgaggtaggagtctaatttcattatttgcacagatatccagttgtcccaacaccatctgttgaaaagactattctttctttgagttgtcttggcactcttgtcaaaaaccagttcactgtagatgtatgaatttgtttatggaccctcaattctacccattgatctatacatctgtctttatgccagtacaacatagtcttgattattgtagctttgtagtaagtttgaaatagaaaactgtttgttctcctagtatgttcttctttttcaagattgttttgactattctgggttccttgcttttccataataattttagaatcagcttctcaattcctgccagaaagtcagctgggattttgattagtattgtatttaacctctatatcaatataggggagtgttgatatcctaatgataagtcttctaatccatgaacgtgggattctttccatttatttagaattttctttcaataatgtcttgcagttttcagtatacagatctttcatctccttagttaagtatatttctaagtattttcttctttctgatgttattttaaatggtattttttaagttcatttttagatttttggctgctagtgaataaaaatgtcattgattttttaatattggtcttgtaacctgaaaccttgctgaacctatcagttctgttattttaaaaatggatttcttagaattttcttagaatgtaatatatcatttgcaaataaaaatagttctgcttcctcctttccaatctgtatacctttctttcttcttcttgtctcactgccctggttagaacctccaatacaatattgaatagaagtggtaagagtgaaaatcactgtcgtgatcttgaacttaggaaaaacatttcagtcttttaagattaagtatgatgttagctgtgagcttttaatagatgacctcattaaagctaagtaagtaaccttatattcccactttgttgagtattttcatcatgaaaatgtgttgaatactgttttatgctttttttttttttttgcatcttgagaagatcgtgtggttttagtcttcttttaatatggtgtattacattaattgattttataaagcatgttgaaccagtcttggattgctgggatcaatcttacttggtcatggtgtataatccttttagtatgttgctgattctgtcaatggcttttatttctatagtcatatgaaatattgctgtacaatcttcttttctcgtaatgtattttacttgttttagtatcaggtaatactggccacatagaatgagttggtaaatatttctctcccattttttgctagagttaatgaaagattaatgcaaattcttctgtaaatttttggtagaattcaccagtgaagccatttgatcatgaggctgaggcagaagaatcacttgaacctgggaggtagaggttgcagtgagctgagatcacgccactgcattccagcctgagtgacagagtgagactttgtctcacaaaaaaaaaaaaaaaaaggccaggcgtggtggctcatgcctgtaatcccagcactttgggaggccaaggtgggcagatcacgagatcaggagatcgataccatcctggctaacacggtgaaaccctgtctctactaaatatacaaaaaattagccgggtgtggtggcgggcacctgtagtccccagctactcgggaggctgaggcaggagaatggcgtgaacctgggaggtggagcttgcagtaagctgagattgcgccgctgtactccagcctgggcaacagatagagactctgtctcaaaaaaaaaaaaaaaaaagggggggggaagtgttttgatgacaaattctatctttacttgttatacatctattcagatattctatttcagctggtcgcagtggctcacacctgtaatcccagcagtttgggaggtggatcacgaggtcaggagttcaagatcagcctggccaacatagtgaaaccccgtctcttctaaaaatgcagccgggcatggtggcaggcacctgtaatcctagctactcaggaggctgagacaggagaattgcttgaacctgggaggcagaggttgcagtgagccgagatcatgccattgcactccagcccaggcaacagtgtgagactctgtctcaaaaaaaaaaaaaaaaaaaaaaaaaaaaaaaaaaagatattctatttcttcttgatatattctcagtattttgtgtctatctatgaatttgtccatttaatctaagttatttgtcatcacacaatttttgaaggtattctcttataatcctttgtatttctgtaaggtagtaacatcccctctttcatttctaattttagtgaattagaacttctctgtattttctttggtcagtcttggtacaggtctgtcaattttgttgatcttttcaacaaatcaacttttgttaccttggttattctctactgttctttgaattctctatttcatttatttcctttttcatttctagtatttcctttaattgcctcgctttgggtttagtttgctcttttttttttcctaattccttaaggaggaaggttagattattgattccagatgtttattcttttaaaatacagatgtttacagtattttttttttttagacagagtctcgctctgtcagccaggatggagtgcagtggcatgatctcagctcactgaaacctccgccccctgggctcaagcagttctcctgcctcagcctcccaagtagctgggattacaggcatgtactaccacacctggctaatttttgtatttttagtagagacggggtttcaccatgttggccaggctggtctcgaactcctgacctcaggtaatctgcccgtgttggcctcccaaagtgctaggattacacacgtgagccaccgtgcctggcctagatgtttacagcttttttaagtttccctgggagtagtactttcactgtgtccccaaaattttgggacattgtttccattttcatttatcacaatgtatttttcaatttttcttctgatttcttctttgacccactggttgtttaaaagtatatcattgaatttccatgtatttgtgagttttccatttttcctcccattattgatttctggtttatttcattgtagtcagaaataatacttgtaatgatttcaacctcttaacatttatggaaccttatattttatggatgaacggatggcctatcctgaagaacatgccatgttcacttgagcagaatgcgtattttcctgttgttgggtgaagtgtgctacagatgtctgttaggtttgtttgtagttgttggtttgtagttttgttcaaggcttttattttctgttgattttccttctagttgttctacccattattgagcagggtatggaagtctccaagtattactaaattattgatttctgatgctttttgctagatgtgttttggggcctttttgttaactttgtatgtttataattgcatatttagacttgttatttttttttattttttatttttatttttttttgagacagggtcttactccagttgcccaggctggagtgaagtagtgaggtcatggcttactgcagcctcaacttcctgggctcaggtgattctcccacatcagtctcctgaatagctgggattataggcacatgccactacacctggctaatttttttgtacttttagtagagacagggtttcatcatgttacctaggctagtcttgaactcctaagctcaagcgatctgcccacctcagcctcccaaagtgctgggattgcaggcagaatggcacttttatcattataaaatgttaattgtttctattaacttttttttgtcttaagggtctattttatctgatattagtataaccaaaccagctctcttttgtttactatttgcatggtatgtcttttcccatcattttattttcaacctatttgtgttttttaaactagtgtttctcttgcagacagcatatatcacattgttttcaatccattcagccaaactttgcctttagattggagtatttaatccatttacatttaatgtaattactgataaggtaggatttactcagctattttgtaaaatactcactttgctatttgctttctatatgccttacgtattttgttcttctgtctttccattactttccattttctccaatagacactttccagtatataattttaattctcttgtcatttacattactatattttcttatttttattagtggttgaagagtataataaacatatcaaccagtaataaactagtcaggaaaattgccaacttaatttcaatagtacaaaaaaatggtccttctgttccctcatctgtcacctttgggttgttattgtcatataaattatatctttaaacattgtatgctggtgcagaagaattaacattgtaggttggattgtttacccctagaaaggtctgtttaaaggtgttcctgggctgatgaatgaaaacttagattcaggagggtacctgtgattgactgataagagtgtctcactgtgcctgaactgtttgagtaaacaatatattaatgctgaatactcattctccttttgagagtctagtcttctggaaactgctaggcagaggctgcctatatgaccagccccagtaaaatccctgggtgctaatgagttcctctgattggaaatatttgacacatgttgccacaactcattgctcggggaagtgtgtcctgtgtaactgcactgggagaggacacttggaagcttaagactggctccctagactttgtcccatgcacatgttttgttctctttgctgactgtgcttggtgtcgtttcactgtaataaatcctagccatgtatacagttatatcctgaggctatctaactgttccaagtgaattgctgaacctgaaggtggtcttggcaacccacaagacaatcaccacagatttacaattattgttttatgcagttgctcttttaaaaaatcaagagtaaaagaattataagcaagaagtacctttatattaacttttacatttacgtatgtcgttaactttgtgggtattctttatttcatcgtgtgcatctgacttacttcctaatatcctttcatttcagcctgaaagactccttttagtatttctcgtaggacaagtttgctacagagtaattctcttggtttttgtttatttgggaatgtcttaatttttaccttatttctgaaggacagttttgttagatatagtattcttggttgacagtcattttctttcagcactttgaacatgtcaattaactgcttcctggtctggaggatgttttgtatatgatgagttatttctctcttgccgctttctagattctgtcttctggctgtttgatttcaaccatctagataggaatctccctgagttcatcctacttggagttcgcttatcttcttggatgtataaattaacgtttttcatcaaattcggaacgttttcagccataatttctttaaatattctttctattcttttttctctcctctccttctgggactccaaatatgcatatgttggtacgcttgatgaggttttacaggtctctgagattatgctagttgttcttcattctttttctttctgttcttcagagtaaataatctcaattgatgtttaagtaaatcaattctttcttctgccttcttaaatctgctgttgggcccctgtaatgaatatttcattttagctattatactttccaactccagaatttccattaggtttttgttaagcaaattttatctctttattgatattccctatttagtgaggtgagacatcattctcacagtttttgacacagtttgcttagttattgaatgtatttgaactagctttctctcctaaggcatagctttgtctactaagacaaatgtctgggtttcctcagggagagtttctattatttttttctcttagttatactttctttgttatgtgtcatgatttttgttgaaaacagtacattttaaataatataatgtggcaaatatagaaatcggattattctccctcttcaaggttttttgttcttgtaatttttctaaaataatcttgtaaagtctgtattgtcatgtgtggtcattgaagactgctcgattaacttagtagtcagctaataattagacagagatttccttaaatgtctagaaccatcatgtctcccattctttgccaagagtctctgcatatattggggcataatttcaatcctcagcactgtaggtaataactctgatcttgttttcacttcctgcttcagcagagcaccaaggtgatagcttagggccttttcaggtcttttcttagcatgtccacatcactggtcacatgcactctcctacacatatgcatggcccactaaaatcccaggaatatgtcagaactttaaaagctctctatggacattgcattcctcagcttttctctttacattttttggctagcctctcacttgccccaaatgtcattcattgtctcaggcaactgtgaagttaaacagctggctgggtgagctctgagtcaggtcaaataaagatagccttgtgagtggggtcttccaggaaactcccaggtaggtcacataattctctggaaatgtactccagacctgttttgctccctccaatgactgtcaggttgttggctttcctcacgatttcaggctattggtttttaaggctattgtgaacttggagagaggtgagaacagagcaagttaaaataccacaaagcttactgttcttactgcaattcagctatttttaaggagtaaattcttcctagaatgctgtaacttttggttaatacccagagttttgataaagttgcttctaacttatttttgcctattttctcattgcttttagaaatttcagaggtctttgttctgccatttttgaggaccttacccaatttgctggcactctgttgaggacatcttcatctatgtttcagagggatattgatctatagttgttgttgttgttgttgttgttttaacttttattttagtttcaggaatacatgtgcaggtttgttatagaggcagattgcatgtcatggtgatttgttgtgacaaattaggaccgattattttgtcacccaggtaaaaagcagcatagtatccaacaggtagttttccttgaatggtagctcaactcttagttcaaacagcttaattttaagctctccaccctcaagtaggccctggtgtctgttgttcccttctctgtccacatatactcaatgtttagctcccgtgtataagtgagaacatgtggtatttggttttctgttcctccgttagttcatttagaataatggcttccagctccatccatgttgctgcaaaggacatgatcttactcttttttatggttacatagtattccattgtgtatatgtaccacattttcttaatccagtctactatcaataggcatttaggttgattccacgtctttgctactgtgaatagtgctgtgataaacatacagatacatatgtctttatgggagaatgactcacattcctttgggtatacacccaataatggaattgttgggttgaacagtacttctgctttaacttctttcagaaatcaacaaactgctttccacagtggctgaactaatttacattcccaccagcagtacatatgtggtcctttttctctgtaaccttgcgagcatctgttctttttttttttttttttttgactttttaacgatagccattctgactagtgcgagatgttatctcattgtgtatgtatgtgtttttttgtttttgtttgtttgtttgttttgagacagagtctcactctattgcccaggctgaagtgcagtggcacaatcccaactcactgcaaactccacctcccgggttcaaacgattctcctgcttagcctcccaagtagctggaattacaggtgtgcgccacaacacccacctaatttttgtatttttagtagagatggggttttgccatgttgggcagagtggtcttcaactcctgacctcaagtgacctgcccgccttgacctcccagtgctgagattataggcgtgagccaccacgcccagccacattgtggttttgatttgcatttctctaatgatagtgtgttgaacattttttcatatgcttcttggccacatgcatgtctccttttgagaaatgtctgttcatgtcctttggccactttttaatggggttgttttttgcttgtcaatttaagttccttatggattctggatattagacgtttgtaagatgcatagtttgcaaacattttctcgcattctgtggtttgtctttactctgctgatagtttcttttgctgtgcagaagctcttaagtttaattaagtcccattcgtcgattttgtttttgttgcaattgcttttggtgtcttcatgatgaaatctttgctagagcctatgtccagaatgatatttcctaggttttcttcaagggtttttagtttaaggttttacatttaagtctttaattcaccctgaggtggttgttgtatatagtgtaaggaagggggtccagtttcaatcttctgcttacggctagccagttaggtcccacttgtcaatttttgttttgttgcaattgcttttgaggacttagtcacaaattctttgccaaatctgatgtttagaacagtatttcctaggttttcttctaggatttttatagtttgaggtcttacacttaaatctttaatccatcttgagttaattttaatccatcttgagttgatttttgtatatggtaaaaggtagggggtgcagtttcattcttttgcatacagcaagccagttactccagcaccatttattgaacaaggagtcctttccccattgtttatttttgctaattttgtcaaagatcagatggttgtaggtgtgcagttttatttttaggctcttatagttttcttttttcccccttttccttttgtttttgtagtcttcatctggtttggttgctggttaattctggtctcataaaataaattgggaaggattgcatcttctgttttttagaagagattatgtaaaatttgtgttatttcttctttaaatgtttggtaatatttgctagtgaacacagctgggtgaattttttagaaggcttttaactattaattctatttctttgctagatagctatgcgtgttatctgtttcatcttggcctcataaaataaattgagaaggattacatcttctattttttagaagagatcttgtaaaatttatgttatttcttctttaaatgtttggtaatatttgttaatgaacacatctgggtggagaattttttagaaggcttttaactatgaattctatttatttgctagatagctattcatgttatctatttcatcttgggtgaattttggtattttgtgggttttgtggaattaatctacttcatctaagttatcaaatgtatatgtatagagtttttcgtagtattctcatattattcttttaatgcctgtggagtctgtagttatactattaatacctcttttattcctgatattagtaactgtggcttctcttttttttctttgttaattttgctagaggtttatcaattttattgatcttttcaaagagtctatttttttctgtttttcaacttttattttattttagattccaggagtacatgtgcaggtttgttacaaaggtatattgcatgatgttgagtttggagtacaattgaacctgttacccagaaagcaagcatagaacacaataggtagtttttcaacccttgcttccctccttctctgcctccacttacattcattccctagtgtctatgttcccatctttaagtccatgtgtacccattgtttatctcccatttataagtgggaacatatggtatttggttttctgtttctgtgttagtttgcttaggataatggcctccagttgcatccatgttgcggcaaggacatgatttcattcttttttaatggctgtgcagtattccacggtgtatatgtaccacattttctttatctagtccaccgttgataggtatttgagttgcttctatgcctttgcttttgtgaattgtgctgtgatgaacacacagctgcatgtgtctttttggcagaatgatttattttcctttgggcatataaccagtaatgggattgctgagttgaatggtagctcaactcttagttcaagcagcttaattttcatttcactgatttcattatttttgttacaattcatcaatttatacttgtttttattactcctttttttcctgtttgcctcacatttatttagctcttctttttctagcttcataaggtagaaactaagatcaatgatttgaggatgttttttcctaaaataagcatttaatgacataaatatccatctgagcactgctttagctgcagtccttacattttgatatgctgtattttcatttttgatcagttcaaaatattttctaattttacttgaaacttgctgttttgcctgtggattatttagaaatatgctgcttaatttccaagtatttggacatttttctgttattgatttctagtttaaactagattactagtttaattccattacagtcagagaacatactggacttgagttggctaataatgttgctcaagtcatctatatctttattagtttgtctactagttctgttattgagaggaattttgaagtttccaagtataattgtgtatttttctatttttctcttcagatctgtcagtttttgcttcatgtattttgaaaccctgttttggggtgcatacacatttatgattcttatgtcttcttggtgaattcacccttttatcattatgtaatgttctcttttatccctaattttgtttgcttggaattctactttatctggtattatacagttacttgagctagatcattggtattttgaattctggtctcctttcttaatctacctgctagtgttgacttttcagagttctcaaacagctactccacatattctgtctaggttttttagactactaaatatgcttacttcatcttttctaggactgaaacgcccaaactattttttaaagttaattttagctttgtaaattttaacttttatcaaagaaacacgaacacatagttttatgttttcaatgaaaaacataactgtcctttccctacccacctcctgtttacaattcccattcctcagaaacaattactttcaatattttaggtagatcttctggttatttatctccatatttctaaggaacattgatcctactactacttcttggtttttgaactttagaacttacgtactgattctctcctgtggaagatgtttatttctcttataccactgatacttcaccatcccttcctgggaatattaacaactgagtcacatagtgcactataattagatttcctttattgtacaagactttttgccttccctggagttaataactgcctcttctttttgtggattaatttttaatgttttctgtcattaattaatccccaaaccatgccatagctgtaaaaattcttccaagtatggtcaaaccttctatcctctgaactcaatttagactacttgctgcactgttatcattccagagttttccttcctggttgttttaggaattatctttgcctctattctggattggaaccctagttccctgcatccttgatattcctttttaaattttttttttttattttgatggagcacatcttccagtaacatcctgagaaagtgtccatttgaagcaaatgttttaggtccttgtatgttgaaggctttattttgtcttatagtttattgatagtttggctcatgtagaacttaagttacaaatcaaaaatttccctaaaatatttgaagacaatttcttctatttttttggtttcagtgttgcttttcagaagtctgttatgattctgattctctatcttttgtaagatagagacctgtctttttgtctttggaagattttaagactttttctttatccccggtacttggaaagggcacagtgaagtgctttgtagcttttcctcctttacctgtgcctgagtgagccccttcaaccaagaaatcgtgttactcaattctgagaaattttcttgagttatttctttgagatgtttctttcctttattttttctgttctcatgatctgagccttctatgtatcagaagttggttattgcatactgatcctctaattttctagttcttctttcctgctttctctttttgatctggaaaatttccattttatcttccaagccctattatgcatttaaaaattgttggtatcatgttaatttctaagcactttttcttattcttttgttcttgtttcatggaggcaatatggtacatctctatggatattaagatttttttttgaagatttctcctatctgggggttggcaaactatagcctatagtgcctacaaaaatagcccatgtcttgtttttgtacagcctccaatgtgtaggaatggtcttcacatttttttttttttttgagaaggagtctcattctgtcgcccaggctgaagtgcagtggtgcaatctcggctcactgcaacctccgcctcccaggttcaagtgattctcctgcctcagcctcctgagtagctgggattacaggcgtgcgccaccatacctggctaatttttgtatttttagtagagatggggtttcaccatgttggccaggctggtctcaaactgctgacctcaagtgatcatttttaagaggattaaggaaaaaacaaaaaatatgtgacagagactgtatgtagcctgcaaagcctaaaatatacacaatagtcccccacagccacaatcttgcctatggtcaaagttactcacggtcaaatgtagtccaaaaatattaaatggaaaattccagaaataattcatacatttaaaaatgcatgcccttctgagttgcatgataaaaatctcatgctgtcccactcaggatgttaatcatccctttgtccaccatgtccatgctgtatactctttttgcccattagtcacttagtagccatcttggttatcagatagaaaaaacatagtatacgtagagtttggtactatccatggtttcaggcatttagtggaggttgtggaatctatcttctgtggataaggagagactactgtactgtctggccctttatagaaaacactggccaatccttgttctagtctgttgtgttgtttctattttctcagagttcttctgctgtgtttttgtttgctttgttggacttgttttgttgttgttgttttggtctgtttttcatgttacagactttctttgacaatctggtgaagactctgcacttacttaagagtaaggcactaaaacactgattggcagctctgaatgtatgggtagagcttataggctgggaagtttgctatagggtaatttggcaggaactgggccaatttgtagatattttctcatggggtggtcagtttccctaaaaaggaattctacacgcttggtagatgtaagactgattgtcagcctactcagagctgaaaagaaaaggggggtggagttctcacattcagtatgtaaaatccccgtatataatattaacctccatctttaatacgtcctcagctgtgcctggtgttgaagaatacagagtctctgttgttcaacctttccagaagtaaacctgggtgagggaggaggctaattgtttcttatactaatttgcaaccaagccacctgtttttaaaccttactttcattgacattttagattgctccaaatcctaggctttttcatgcataaatctgaaagtgcttgttgactatcatcaatgtagatttaaatttcagctttctcttgcctgctaagtcattcagtcattcggctgttttccagtgttcaaaatgtgttgatatcgcttgtctgtcactgtctcctctctctctttgtaatattgtaggtttgacattttcatttctttattatcataggattttgagggggtgaagagtaacataaatgttcaatttttctacaaagacaaaaaaaatctaaattttatagggcattattttttgatattattttaaagtaacctataggctccaaggcaacagaccataacactgggaaggataggaagaagattaatattgtcaatactacagaagagtattgaaagtcaatggaaagtcagtgtgccactgtattttggttccagtttgatttatgtttaaagcattctatggtatggtagaaaggtatttctgttaatgaaacaattcaaagaaaaaagatttcaccttttctttttaccattgttttcaaactgccttgcttaaatgaattatgccggcttgagacaaagattatactttcagtaaagcaacaaagactagttagaaaactcatagtgcagttgtaacctggttgcaaaaccatcttgtatgtttccaaaggctgttcttgtatttcatagacttatattacttcaaatactctaacagtcccatgtgtgcttaaaaaaattaacattaaaaggaatccattggtttctgcttactttagatcttctgtatcccttacaagaagagtgcctcagagtataagcaccttttctgtcaatcaatatacattatgagttttattaaataacataaaacatttgcttggtctttatttttttaatttaaaaaattttacttattgattggttttaaagggtaagttcctttgtaacaaattattaattattgacattattccctgaaaatcagtaaaatgatagctgggctctccatttaaaaaaattaataaaattctaaaagtacagtattatatatcaatactataaatacatgatttttatgatattccaggaaagcatgttttgaagctctaaaagctctctgggcaatgttgtatggcaggaaaaagcactgaacctcacatttttcactaattcaacaagcatttgagacttagttggttgctgagaatgtaacaacgtaacacatgttcaaggaagaaaacagataggctattacaatacaatgagatatgtgctataatacagatagcaaccaaaatgctataggtttactaaggtataaataactctagttggagaagttttaaaggtcctcataaaggacatgactttcaatgaggttttgattgctaaatttgccaaacgaattgtatgataacttataagccaaggcaaagcataatgaaagaatatagcatgtttgatagtttaatactgacatacttatgtttaatagtgaaaaattcggtggctagaggtagaggataaggatgaaaaagcaggtattacagttttagaaatggatgggaacaagatgtaaagggccatttagtagccatgtggccttagaaaaataatttaatttctcacaaccagtttaaaaacaattcaggctgaggcaggtggatcatctgaggtcaggagtttgagaccagcctgtccatcatggtgaaaccccgtctctactaaaaatataaaaattagctgggcatggtagtgcgtgcctgtaatctcagctactcaagaggttgaggcaggagaatcgcttgaacttgggtggaggaagatgcagtgagccaagactgcaccactgcactgggcgacagagcgagactccatctcaaaaaaaaaaaaaaaacaaacccaaaaaaacccaaacaaacaaacaaaaacaaagcaaatcaaataaaacatcaagtagcaacatgcattgctactggaagtgattggtagaagaatcaaatgagataatatatgtggagaaggtttgtaaacgagaaaaccacatacaaatatgacttctgtttcacatggtttcttgaaattcaaggcattgcttatactaaaaggaagaaaaaaatcaactgagctaagaatacttattttccgcaaattgagtataatgactaaaagtcaacaatttcaaaaatatattcaagcgcccctagaaactattagctgaatattaaaattcaaaaaaaaaatgtcaatcagcagggagacacaaagtaagcagatgtgatgcttcaataaccttcagtgcaacttgattccaagtaaaatgggatttctagggaaaaaaggggagcaggatctctgtagcttaaccatagacctgaatcactcagtttgaagaaaaacacatgcagaataccattctaaaatgatggggagtggctgggtgtggtggctcacgcctgtaatcttaacactttgggagcctgaagcaggaggatcacttgaggccaggagttcaagaccagcctggccaacatagcgaaacccgtctctactaaaaatacaaaaattagccaggcgtggtggcatgtgcctgtaatcccagctactcaggaggttgaggtaggagaatcgcttgaacctgggaggtagaggttgcagtgaactgagatcgcaccactgctctccagcctgggaaacagagcaagactctctcaaaaaaaaaataataataataataaaaacaaaaataaaaaataaaatgatggggagtacagtgggtgacatgttctagggcttaaatctagttgttgtagtcttatgtctaagctatacacaaatacacatagcttatgtatttgtatatatatacatatagctatgtctaagcgatacacaaatctgaacccacatgccatctggtttacaaatgggctaatgtaaatacacaagacaccagaaaaataaaaattttttatttgactggttaagattatgattagttgtgggacttctggttgaagtgcaaatatgtcaactgatcatgttttcatgattttactcttaaccaatttcttttttttagatggagtctccctctgttgcccaggctggagtgcagtggcgcaatcttagctcaacgcaacctccacctaccaggttcaagcaattctcctgcctcagcctccccagtagctgggactacagacacacaccaccatgcccagctaatttttgtatttttagtagagacggggtttcaccacgttgaccaggctgatctcaaactcctgacctcaggtgatccacccgcctccacctaccaaagggctgggattacaggcatgagccacctcacctggcccaacctgtttctatgaattatccaaatgccttacagcttcactaggaaataaataattacatggtgaagttaattaaaatttcatagagaatataaaatattaatttgtgggccgaatgtggtggctcacgcctgtaattccagcactttgggaggccaaggcaggcggatcacaaggtcaagaaatcgagaccatcctggccaacatggtgaaaccccatctctactaagaatacaaaaattagccaggcgtggtggtgcgagcctgtagtgccagctacttgggaggctgaggcaggagaattgcttgaacgcaggaggcagaggttgcagtgagctgagattgtgccactgcactccagcctggctacagagcgagacttcatctcaaaaaaaaaaaaaaaaatttaatttgcacaaaacctaattatagcatttacaaattagatgttgatgccctacaatatgaaattaagggatagtaatgcaccacataatgatgtttcagtcagtgtgaagtgcatatatgatagtggtcccataagattataatggagctgaaaaattcctatcacctagtgatgtcaccattgtaacattatagcacaatgcattacaagtgcttgtggcgatgctggtgtaaacaaacctactgtgctgctagtcttataaaagtatagcacatacaattatgtatggtatataatacttgataatgataataactgtgttactggtttgtgtatttactatactgtacttcttatcactacagtgtactcctttcacttacattaaaaaaaaagttaactataaaacagcttcaggcagatccctcaggaagaattccagaagaaggcattgttatcacaggagatgacagctccatgcatgttatttattggtcctgaagaccttccagtgattcaagacatggaggtagaagacagggatattaatgctcctgatcctgtgtaggcctaggatactacatgagtgtttatgtcttcatttttttttttttttgagatggagtctcgctctgtcgcccaggctggagtgcagtggggtgatctcggctcactgcagcctccacctcccgggttcaagtaattctcctgccccagcctcccaagtagctgggattataggcacctgccaccacatccagctaatttttgtagttttagtagagatggggtttcaccacgttggccaggttgctatcgaactcctgaccttaagtgatctgcccaccttggcctcccaaagtgctggattacaggcttcagctattgcgctccccatgtcttcatttttaacagaaaagtttaaaaagtaaaaaaataaaaaataaaaatttcaaaaatagaaaaagcttatagaataaggatataaaaattatttttgtacagctgtataatttgtgttttaagctaagtgttgtaaaagagtcaaaaaggtaaaaaaaaagataaaaagataaaaagtttataaagtaaaaaagttacagcaagctgggcacagtggcgtgtgcctggagttccagctacttgggaggctaaggtgagaggactgcttgaacccaggtgttcgagaccagcctgggcaacatagccatacctcatctctcaaaaagaaaaagtcagaataagctcagggtaatttattattgaaaaaataaaaataaataaatttagtatagcctaagtgtacagtgtttataaagcctacagttagtgtacagtaatgtcctaggccttcacattcactcactacttgatcgactcactcagagcaacttatagtcctgtaagctctattcgtggtaagtgccatatacatttgtaccatttttaatatactgtatttctataccatatctttactgtactttttctacacttatatactcaattacttatccttgtgttacaattgtctatagtacagtaacatgctgtataggtttgtgatctaggaacaataggctatatcatatagcctatatgtgtagtagactatactatctagatttgtgtaagtacattttataatgttcccacaacaatacaattgcctaacaactcacttctcagaatatatccgttattaagtgatgcatgactgtataaaataatgatttaaaaatgagtctcacaaagcacaaatcttaatgggcaagaatatttagaagtcggagtatcatgattaaatgtttagttggtgttaattctttaggatcacgattatagtttgttttaacccttcttcaatgatttgctaatttttttttttttttttttgagacatggtctggctctgttgcccaggctggaatgcagtggcatgattttggctcactgcaacccccacctcccaggctcaagcgatcctcctacctcagcctcccgagtagctcacatctgtaatcccagcactttgggaagctgacgtgagtggatcacttgaggccaggagttccagaccagcctggccaacatagtgaaaccccatctctactaaaaatacaaaaattagctgggcatggtggcgcacgcctgtaatcccagctactcaggaggctgaggcaggagaattgcttgaacctgggcggtggaggatgcagtgagccgatatcacgccactgcactccagcctgggcaacacagtgaggctgtctaaaacaataataataataataataattaattattttattttttctttaattattaaatatccttcagtttcaatgttatccttcaacattatcactatacataaaaggcacaagaaaatatagattgtaatcacattgttatctaaagcttacaaataacattaaaatgaaaatgatttttttttctgtcagatgtcttctttacatagaagcagaatgaaaaattgtgcaactacagaagctcactgggcagtaaaatagattttgtttctatttgatgatattttaacagatacacagattccgtactgaaagtacactttcaaatagaatatctcctcacactggctggtatatcaattttcttccctgacattttgggggaggtgaggagagaggtctgtttatctataaaattgttatctgagctttgatgttcacaagacaaaacttttttgatttgataagctttctttaatatttactgagcatctttgtgtgctattcattgttagatcaatcacaaaatttctttaaactttagcaaattgtgagttttgttttgggaataacttattcttcttactcttttcaaattctacttgtgacagctatcattgaatacataccagttcctatggttccagttaaataaaattttaccaagtttattataaagagtaaagtagcaagactagatttatatatatagccctgtcacagataatattatattaaatttcactccacttacctaccaagggcctggtttaaggccctgtatgcttgaatttcataccactgacggccaggtagaagacctctcaattttgaatggtggtcattgtattgtcgttttagttcaacctaataattttaaaatatatttaaaaaattagtagataattaaagctcattttaaacatcatattaacttctaacagtttgaatatacatatttttagggtagagattttattttgtttttcagtactgatttttttcgtttcatttaaaatagttttatttagcttcacattccttaaattacctaatgcatataactaatcagctgtgtgatctcaagcagttttattgaacttacattcattaaatccacacaattttcagtgtacaagtaggtgagttttgacatatatagtaatgtaaccaccatcataatatagaacattttcatcacccccaaaagttccctcttatccctttatagtaaatttctttcttccactgctggccctggcaaccactgatctgctttctgttttgccctttatagaatttcatataaatattatcatatactatgtaatgacttgtgacatttttcatttaatatacttttagaattcattcatgttgaaaggtttatgagtagttcattcttttacgtttatccagtctggtaatctctgctttttaattgcaatgtttagaccatttacatttaatgtagttattgttatgattgggtttaagactaccaccttgcttcccccctacccccccaatctgtaccattttgtttttatcttttggatcaatcaagttcccccctccccccatattatttccactactggaaataatatgcttccatattatttccactactggattattagctatgtctttgtgtgtgtgtgactcctctagggtttatgatatacatccttattagtctaccttaaaataatattttaccacttcacatatgatgtaaaaacaataccacaatatacttccatttccttttattgtcctttatgctattgctgccatacattttagttttatacatgctataaacccataaaacattttgattatgctttaaacagtacattatcttttaattttaaataagtttataattttgaaataagtttagatttacagaaaagttccaaagatagtacagagattccttataccctttacccaatttcccctaatgttaacatcttatattactatagctcatgtcaaattaagaaattaacattagtacattagtattaaataatctatgtattttattcagatttctgttttgtcccaaaagattatcttttaaaatataccgtatttacccacagatttaccatttctggcactcttcattttctcacgtagatttaaatttccatctggtatcattttccttctacctgaagaactttctttaatattagtagtgcacgtttgctagcaatgagttctttcaacttttctttttctgaaaagacttcactatcttcatttttaagagattgtcccacttgatcaagaattctaaattgacaggttttttcttttgttaaagacggcttttcattgttttctgatttgcatagttctgaagaaaaaatatgctattgtcctatctctgtaatgttcccctttcttttagcgactttggattggattacagtgtgctgttgtgtgtattttgcttgcgtttttattaagcttcttggacctgtgggcttatagtttctatcaaacttgaaaaattttcagccattatttctctaaatatatatattattctgcctcgaaactcttcttcttagactccaattacaactatattagactactttatattactccacatgtcactgaccctcttttttttcactctacacttcattttggataatttttatttataagatttcaagttcaccaaattttccttctgcagtgtctaatccatccagtgtattttttgtttcatatagagagatttcacataggtatttaaaaaatagcttctgtttctcttttcagtatgcttatgttttctgctatcttctttgaacttacagagcataaaacataagatattttaaaaatccttgtctgctagccagttctaacatctctgtcatttctggttttgtttctattgattgattttcctctgtattatgggttaaattctcttctttgcatgcctgctaatttttgattggatactagacattgtgggcattaagtcagtggttactggattttgctgtgaatgcaattagggtacttggaaccagttcattctttggcagctttgttagggaaagtcaagagcagcctttagtctagggctaatttatcccccatacaaaggtgaaactctactgatgattgtttcaagtaccccatgtgttatgaagtttttctcttctggctgctgggaactcaaactattcccagactttgtaagcactaggaagttttctgcctactcatttccctggccttatgtagcttcctctcatgtatatgccaatcagtacttgaccaaaaacttaaggggacgcctatgcagatacctggagctttctctctatgtagctccatcctctctagtactctaccttgcaaattctagctgccacggactttccctaaactttatctctttaactcagtgtgaccactgagctctgtttgagtttattctccctgaactgtggcctagtaattgtctccaggtaataatctggtgcaattgtagtattccaggacaagtatatcaaatggtacagttgtcccttggtatccatgggtgactggtttcagaacttccctcagataccaaaatccatggatgctcaagtacttgatacaaaatgacttagtatttgcataacctatgcatatcctcctttatactttaaataatctctggattactttaatagctaatatgatgtaaagctatgcaaatagttgttacattgtagtgtttagggaataatgacaagaaaaaaatctgtacatgttcagtacagaagcaattttttttcaaatatttttgattcacacttaggtgaatccacagatgcagaacccataaatacagagggccagttgtgtatttttgtagtagaagcctaaataaagatatgtggagttactttcttgaaggaaatcattatattgaagagacattgccccccccccatgtttattgcagcactattctcaataaccaagatatggaatcaacctaggtatccaacaacagataagtggataaagaaaatgtggtatatatacacaatggaatactaaacagtcataaaaatgaatgaaatcctgttattcacggcaacatggatggaactgaggacactaccttaagtgaaataaataaaaaacataaagttaaacaccacatgttcttgctcatatgtggaagcttaaaaatgttaatctcggccaggcacggtggctcaggcctgtaatcccagcactttgggaagctgaggcgggtggatcacaaggtcaggagatcaagaccatcctggctaacacggtgaaatcccgtctttactaaaaatacaaaaaaattagccaggtgtggtggcaggcgcctgtagtcccagctactcgggaggctgaggcagaagaatggcatgaacccaggaggcggaggttgcagtgagccaagatcgcaccactgcactccagcctgggtgacagagtgagactctgtctcggaaaaaaaaaaaaaggttaatctcataaaaataaaaagtagaacagaggatactagcagatgggaaggggagaaggaagggagggatggggagatatttgttttttgtcttgtttttttgagagacagggcctcagtctgtcccccagactggacggcagtggtgcgatcatggcttacttcagccttgacctcctgggctcaagtgattctcccacctcagcctcccaagtaggttggactacaggtgtgtgctgccatgcctggccaatttttttcttttttaatttttatagagatggattcttgctatgttgcctatgatggtctccaactcataagctcaagaaaacctcccaccttgacctcccaaagtgctaggaatacaggcatgagccactgcgtctggctgagatttgttaaaggatataaagttacagctagatagaaggaataagttctaatcttttataccacagtaggatgactatagttaacaatattacatcatttcaaataactagaaggaggagattacatgttccatacacaaagaaatgataaatgtttgagatgacagatacgctaattaccctgatctaatcaataaacatcatatgtatcaaaacatcactatgtaccctatgaatatgtacaataattatctgtcaactaaaaaataaaataaagagtaaacttcttggaaacattttaggctttcaagatatattaacaaaacttatacagcagttccctcttatctgcagtggtttaagttaactgcggtcaactgtggtccaaaaatattaaataaaaaattccagaaataatttatgttttaaattgcccactgttctgagtagcatgatgacatctcatgctatatcctgctccatcccactcagatgtgaatcatccctttgtccagtatatccatgctgtacatactacccaccagcagttagtagttacttagtagctgtctaggtctaatcgagtgtcatggtattgcagtgcttaggttcaagtgacctctattttacttaataatactttactaaattgtaaacctactcaagaaaaaacaaagtattttccgtgtactctataacactgttaactttttcttttttttttgagacagagtctcgctccattgcccaggctggagtgcagtgacatgatcttggctcactgcaacctccgcctcccaggttcaagcagttctcctctcagcctcccaagtagctgggactacaggcggccgccaccatgcctagctaatttttgtatttttagtagagttgggatttcacattgttggtcaggctggtctcaaacgcctgacctcaggtgatccacctgcattggcctcccaaaatgctgggattacaggcgtgagccactgtgcccagccactattaacctttttaaataaaagaacatgctttaggaaagaaaacagaacagtacacttctgaaaagcagctttcaaattgggaggtcaaaaaattttatcttactgtaaaaataaaatctaagctttttttttttttttttttttaacacggagtcttgctctgtcaccaggccggagtgcagtggcgcgatcttggctcactgcaacctctgcctcccaagttcaagagattctcctgcctcagcctcccgagtagctgagactacaggcgtgtgccaccacgcccagctaattttttgtatttttagtagagacaaggtttcaccatgttgaccaggatggtctcgatctcttgacctcgtgatccacccgcctcggcctcccaaagtgctgggattacgggcgtgagccactgtgcctggccaaaatctaaaaacccaaaaccccaccctttttattttacattccctcaaaagaatctgtcaaatttctaaaatgaaactttacaactagaatataaaggacatataaaggacatagactttgccttttttttttttttttttttttttggacagagtaccgctcagtcacccaggctgaagtgcagtggtgcgatctcagctcactgcaacctccacctcctgggttgaagtgattctcctgcttcagcctcccacgtagctgggattacaggtgcacgccaccatgcccagctaattttttgtgtatatatatattttttgtttgtttgtttgttttttagtaaaaacagggtttcaccatgttggctaggctggtctcgaactcctgatctcaggtgatctgcccacctcaacctcccaaagtgctgggattacaggtgtgagccaccacgcctagccaactttgctttttttttttttctttttttttgagacggagtcttgctcaatcacccaggctggagtacggtggcatgatctcggctcactgcaacttctgcctcttgggttcaagtgattctcctgcctcagcctcctgagtagctgggactacaggtgcatgccaccatgcccagctattcttttgtatttttagtagagaggggggtttcactgtgttagccaggtgatcttgatctccagacctggtgatccctctgcctcggcttcccaaagggctgagattacaggcatggagccactgcccccagcccaactttgctttttagggcaacataagtagtaaatgataacataacaccatagtaaatattagatgatatgttaataccctccctggaaattcagcaataaagcacatgataattaagactataagaaaaagtacttttaaaattctgtccagctgggaaaaatatatgtatttcctacctatctctcaaaaatgtaactaaagcagcttctcttctttaacaatattttcctcaaagaaagttgacatctactttgtcagacataatagcttatgtgttttcaaaatttcctacaccatggacagactgatacattatagtggtcactgttccgaagacaacagttgctctaggacgtattagttataaatggaatatttagagtgaatgtagcaactattagattaaataaaattatgactccttggtcttctatttttcattaacataattaaaattttctgtatggctacattgttttaatttattgcaaattttcaaacaccttttacactccaaatggcctttaaaatactgccaatattttacccaggggaatttattttagataaaaagtttaaaaacctacaaaagaacaaaaaactcccaaacaaaaaacaaaaccctgaaatgaactgtatataaaggttaactttgaaatagttcttattacataaacagatttttaaaattaatcaataataaaaattactttgtgagatcacagttaattggaaaaagcaaaactaagggttaagaaaaggtggaaagtgagtacacctcattttaatgacatcagaatctatttcattgtacacttagggattatcaagcatgaaaatcaatgaccaatttaaaatgacatacagcatatgtgaaaaagccagtttctcctgccagcaaatagcctaaatgttaagtaaaccaaaggctggaagggattagttgaaatgtcaaaagacaaccttttacttttacctgctcatccttataaacacattcttatctctcaggcatgctttccaaacaaatagtttcaatgtgcaccaccagcaaaaggcccaaggcaagctctgccatcttgtaactgtcaaagagattagtctttgatctatttgggaggtcatgcccacattcacattaccttataatctaacaacattatacctgttgaccaatgcttccttaatgcctaatgagacagacattttacattatggaagttaactgtgaatgttttttctaagttttgacagaaagtaagcaccataaactgagctcaagtgtggtttgggaagatgatcttttagatcagttaacattacttttcaaatacattttacaagcctttcccaaaatagaaagctatacttaattgtactttttggaaacagttaaactacttgcttcccatccccaataaattagtgtatgtgtaattttggaggggtgtgaagagcaggaaaaagacaaactattttattaacagttgcaaactgaaggcccatagttgtgttttgtgtggcccttactgtggcttaaaataattaaaatttatttgctaccatctaaaactttggctatctcaccactgtcctcaactaacccactcatttaaataacctgtttaattcatgtagctgcttgagtttgcaacccattggttcagatgctgcatagattcacaaaaatttatcatttcataattgaaggtcaagtttgtaccaaatgtaaagctcccttactatgatagtttttagacaaataaatatatatctgcatcaaaatctaacctaactgacataagtagaaataagatcctcaatatcaaaggcattgataattaagactgaggcggtttagaattgggtaaaaatacccaatagacagatggcattcaagcagaagttatatgattttggattctgatttttaccattatatcataatgtacttgagattgaacagaaagtttcttaagttctccatgccttggttttattggaaacagtataagtagcagagcacttatagcagcaatagacaatatgaaataatcaaaaggattatactgcatatgtcaacgagaaattaaggtcacaattattaacattagactttttcaactttcagtcaaactctttgcacaaaagtagcctttttaaagtttatcagtagcttctgaaaaaataaatggtgtgataaatatgagctagaactataaatgcatctcttcattttactgctgcttcacatgaaagatggtggattttatcccaactcataccaatacatattatgatttcagtaataaatgccttcctgaaagcaatcaatagaagaatataatttttttcttgtatgtaagcttgaagacaaaagttcaagcctccaaatgagactaaggacaaataatcagctaaactacataattataaaaatattaagaaaactctgcttcagaaaaataaacacatttgtctagcaaacacttgagtagaacagttttatctttagccaaggtgcagggcctaaagcctaaacatttacagcaaaccaaatctggaagacagagactgtgcattagagacatttgctgctccgtatcatcatagtgtaaacacttctatcagggtatcacaatataaattccaatggttagaattataaactcagcataagatcttgtatgtgatataatttagctagattaaaaagaatatagctggttttatttcatctggcatattttcaagatttctgacacagttaaccaaatagtgtgtgtgtgtgtgtgtgtgtgtatatacactttttttaaatggggaaaatgagttagtttctgccaagagttaagaagccaggctcccttttaaataagaataataatgataaaagcacattagaaatggtttttagttgttacttactttccctgttacgttacaacttgaccacaataatctatcaagacatagtaacagcaatatatttcacatatgctttaagactgttttggataaggtgctttttttggtagagaaatctatattaaacttagtatcgctaattgtcagtgttgactaaaataacctggatatttcaaatttaagaaatagaacaaaatatatccctctgaaatcaggtatctcctcttctcaacatattcagcctcaactggttataaaaatataaccagtttttcctattaaaaagttaatactctaagacatgcaagaaatcttagcatgcttattctgtaaagggctaagttaaagttttcatttttattttttagagacaaggtcttgctctgtcacccagaatggagtgcagtggcatggtcataggtcactgcaacctccaactcctgggttcaagcaatcattctgcttcagcctcctcagtagctaggacttacagatacgtgccccaacaccaggctaattaaaaaaaaaaattattttagagacgcagtctcactacattgcccaggctggtcttgaactcctggcctcaaacaatcctcctgtcttggcctcccaaagctgtgggattaaggtgttatccaccatgcctggcctaaaaaattctttttaagagtaatgacctttgtgtcaatttaggtaggttatccatgttaaaatattactcaaacaaacctgcaaatgtttaaattatcatctctagaacatgccaccattcgtgttatagtttattttgaggaagaaggtataatggaaaaaaagaaaaagcacacggcttggaatcaaggccttgagacttaggttgtttgaccttggacaagtcacagtagccctttataatttcctttctcaatttcttcgtctgtaagaaggggcttagaattagaagtctcttagctttattgaagttggagactgtgtgccaaccttaccttagagaattggttgaagaaataaatgacaatatgcatgaaacagtaaagcatcagatactagaggtaagtggacgagaaagtcattacttaccccatatttctgaaacccagtgtaggtttcagtggactttaaatgctgtcgtaatatattgctgcatggtatgtgaaataagccataaggctgtggaggccatatagtcattaccttagtcagttcaccccaaatcattttaccacctggaccgattccttctgaaagagctctgactacattattcaatgtttggcacataactttaggtgacttaaaaagtaagtttcttgggttcttggagtggctactttttcatcaagtgtcaatgaaaatatatacattggcagaatacatacagaacagtgttcaaacagttttgaaacaaatattttaaaaaataacttctacaattgatcttaaattttctaagaaattttagctaacattagcactctttaatatcctccataatactttttggtcacttttcaacttatgaagtgtttttgaaagcataactatataaaatatgctagtggtgtaatctatgagaatgagtgcatgattggtaccatattagtctaaatattattttattcaaatatcttacaatctagagtttttcttgttaaagtcacatatgagagcccgataactgtgaataaacttttgctagcaataacaactaacaaaataaaatattatcttatgtaagaaagcagtaaatagaatcagaggttcttaaaggaatgagtcaatattaagaggatttaataaggggactcagtaatggtgcattcagcaggtgacagagacctacttctaccttatataacactggaaaaaggcaagattgctcatggaagaggcttttggatgccagaagatgtaatatgacgcataatggcactcagggaattatataaaggttcctggcaatagtagcataaaaagtaaaagttaatcccagtgagaggaggctcagactcagctttcatatgattaaaccctaacatctaaaaacaaacctaagcaagagcgagcatgtacataagaaaaaagattaaatgagtactggaaaatgctgaaaatacacttaaaactttattaccaccacagtccaaaagatgaagtataacacttttgctatctagatttttattattacatccaaattatatttcagggccaggtgtggtggctcacgtttataatcccagcactttgggaggatgaggcaggaggatcacttgaggccaggagtttaggaccagccagggcaacatagcaagaccctgtctctacaaaataaaaattagctgggcatggtggtaggagtctgtagtcccagctacttaggaggctaaggcaggaggatcatttgagcccaggagtttgaggctgcagtgagccatgatctcaccactgcatttcattgtgggcaacagagactctgtctgtctgtctgtctgtctctctctctctctctctctatatatatatatataatctttcaaacatgagcaaaggtttgattttttttttttttgagacacagtcttgctgtgttgtccaggctagagtacagtggcatgatcttggccactgcaacctctgctccctcagttcaagcaattcttgtgcctcagcctccacagtagctgggattacaggtgtgtgctatgacgcccggctaatttttgtatttttagtagacacggggtttcgccatgttggtcaggctggtctcaaactcctgacctcaagtgatccacccgcctcagcctctgaaagtgctgggattacaggcgtgagccaccgcgcctggccacaaaggtttgatttttaaaatatatgatcactttctacctttgaaatattattgccaagaatatttgattcagagcttttcaaatgtgaatgtgagttttggaataagacatatggaatcatagcactttgataactcatgctttatcttagaaagtaatgcagacttctgatttcaataagtcaaaaaaaaaaaaaaaaccccagacatttctttttccctcacctgtcagagaaactgcctttaaattaaaagacaaataggaaacagaaacacagtctccaacttcagtaaagctaagagacatctgattccaagccccaatatatgaacataaaaggtagatggacaaatgttaaatgactaagcagaaaagagaaagttcaaaccaacgtatccacagagctactgctgggacataagccagtttgacctgcaggagttcagaaagtctcaggaaatggaggtataaggaaactgttgggaggatgtgtaccgcaaagatgaaacagtaagcaagaaacaagaggaagatctgagacccaggaaactggcaatccatcacagaagacagacaaatcaaattcctaggatgatagcagttattggatgatagcaggatattggcagttatctgggcttgatgagcaatttagccctgaccgaagtagaagatcaggaggctccagaaatgatatctccaggagaaaaaaggaactggcctgttatctgacaggtctgatagaaaaactgtattgagaggcatggcacacaactattggaaggtgacacatttatttagataaagatcttttaaaaagagaaaaaggaagtggaagagaggagggttctatcaaccctaaagttcaaaacagaaaggaggacgggcggctgtaaccccagcactttgggaggctgaggcgggcggatcttctgaggtcgggagttcgagaccagcctgaccaacatagagacaccccatctctactaaaaatacaaattagctgggcgtggtggcgcatgcctgtaatcccagctactcgggaggctgaggcaggaggatcgcttgagcctgggaggtggaggttgtggtgagccaagatcacgccattgcactccagcctgggaaacaaaagcaaactccgtctcaaaaacaaaacaaaacaaaacaaacaaacaaacaaaaaagaaaggaaatcatttgattacagtgaacagtattttcatagtcatgataatgtacataataactatagatttaattaaaaattgtaatgtaactatcttgggaggctataagaaggaaaaagcagagtaagtgaggtaaaatcctgtctcaaataggaatttaatagttcatgtctaaaactgattaaataaagataaaatatggaggtaaataccagataaaatagctaaagaagtgaaagtcactgcctgtcagaagcaggggctagaagtggggtgcaggccaaaagactgttataagaaaaagctatctactgtatttagtgtatattagactcttggtaagtgctttattggacgtttttcaacttgataaatcataatttaaaaacaaatgcagattattaattttaatttattgtatacatttgtatgcctcactatgtaaaacagtggtgctcaaccgagagcaattttgccaaccagaagataatggcaatgtctagagatattttgggttatcacaactggtggcagggtgaccgtggggggtgtctagatcccactaccggcatctagtgggtaaatgctagagatgctgttaaacatcctggaatgcacaggacactcctcggaacaaagaattacccagtccaaaatgtcaatagtgccaagtttgagaaacacagcttgaaagtaatttcaagtcacaaatctggtatacttgatgcagtaggaaaatacactgagttatttgtatagcttactatagtcactgacgcactggggtgatgtgtcctacagttacaaagtataaactgaactcattcccaagctttcaagcctttaatcctagggaaaaacaggaaagagtgatgttgtaaacatggaacagcaatatctactacagtttatgttatttgagaccttaaagctttacagttagaaaaaaaagtgacatagtcacctgaagcccctctacatgtctacaatctgtaggcattgagagaatttgactgaataaactgattaaaattcacaactaaaattctcctcaaaagaaaaaaattagttattttcagagaagctaaaaaacaatcccaccactgcccttaaggtagagctgctgattatgctccatgccaacataagtaggtaagtgtcaatcaaccttacaagtcctcagggtgataatttcacttttaaatcctccaacctagtttgagagcaaaattaatatataaaggtcaaagttccttttctcaccaaaaataagatgaacacaagaaaataacttcagaattgttcaaaaatcaaaaccaaaagtttttatttattaattatccagagaaacttccagcaatattttcaggcatggctttatgtatttatttatttattttttgctaaggaaatacaatgacatgagtattaggagaaaaaggttatcaaccgaacttgcttaaaattttgggattttaaatatttccatccttgatcccaaaatatcttttaaaaatatggagaatttaaaaattaacctcagcaattcatccatttgttttgtgtttttttgtttgttcatttgtttttcagaagggatggaaacagaggggtttcattaactcattttttgctggccaaggtaaatatacaatttattaacctagacagcttacttagatttaaactaggttttaattttggaatttcaagatatacttagaaactgctttcaaaatacttttggccaaactatcttaaaaaaaaaaaaaagctggggaaaaaaatactctgaggaggaaaaaaaaggtttaagtaattgaggatatactcactctagacttttagaggtgacaaggttttttcttctatatctgtgatggaacctaagtatttccaaaaattccaagagcaagttgctgaacttgtaaatgttaaagagttaagtattacagcactttaagtttatattcacatccatttcccctgggtaaccatgtattattatcagagctatatccaggtgggtctctgtatcagatgcaacactataaccagaagtccactccactctgacctcaggctgtattcctggatctggtttcccataacttagaatgtcccaaatcctgaaaatggcatacagagtcctaagtgatttggctcctaaatacctctcccagcttctattcacatgccattctctcagactcacaacttcagcttctttcagttcttggaaactgctatcctctttcaaccttagaaccttaacacatgctgttctctctgttgagaatactcttatccattctgtacacattcataactcctagttttctttccagtgtcaggttaaatatcacttcctcaggaagcctttcttgatccccaaagacctgctataacattcccagggttcctgtgactttttcttatagcctttatcacaactgtgattgtttcttcattacattaatgtcaatattccttgctagactataagcaacatgagacaaggggctataaactgtgttgtgtatcactctgtcccctgagtctattataatacttggtgctctagccagatattaaaaaaaaaaaaggttgctttattattctgaatagttgctttttttcttttctttctttctttctttcttttttttttttttttttttttgagacagagtctctgtcacccaggctggagtgcagtggagcaatctcggctcactgcaacctccccctcccaagttcaagcaactctagtgtctagtgtctcagcctcccaaatagctgggattgtgccatcacacccagctaatttgtgtatttttagtagagagagagagtttcattatgttggccaggttgttctccaactcctgacctcaagtgatccacccacctcggcctccaagtgatggaattacaggtgtgagccactgcacccggcctattctgaatagttttataatctgaatagttttgttgtaatctaacctctgatgaggccattccactttatgaaatgtttgtatatttgaatctcactgtagagaagattcaaatctcatctctctggctcctccatcccttttaggcaagttagtcaaagtaaattggtatctgcaagggaggcgaaaggtgttggtcaacttcagctttcctaagcatctgagcacctggtttctattccaccaaagcatcttgttatatgttcctgttcttccataaattattgacattactagtgtagagacagcatcttgttcatttttacacctactgcattttgtacaaattaagctcttaaaaaaagtttgttaaatgaatgaataagtgcatgacaaaacattcaatatcattaacatttttttttttttgagacagtgtcttgctctgtcgcccagactggagtgcagtggcgcaatttcagctcactgcaacctttgccccttaggtacaagtgattctcctgcctcagactcccaagtagctggaattacagacgtgtgccaccacaccggggctaattttttgtgtttttagtagagactgggtttcaccatgttggccaggctggtctcgaactcctgacctcaaatgatctgcccaccttgggctcccaaagtgctgggataacaggcataagccactgcacacggccgtcattaacatagttttgatagaagagtaattcaaaagggatttataaatctattcaaaaggaacagatgaatctacctaaaaggtttctgaagtcaagttcctcttgatatactacagtcctttgcattcctgccctcattcattttctcgtgaatattcatattgccgtcaaagcaaaaggaataacaatggaacaatatcattctccttaaaaagaaatctgttagatttaagaattctaatacagccaggtgcaattggcgcgagtctgtaatcccagctgctcgggagctgaggcaggaggatcatcacttgagcccaggaccagcctgggcaatatagtgagactctgtctcaaaaaaaatttttttttaattccaatactaccatcatctgataatattttgacagttgaaagcactggtttaacatggtttaatgtgctttattactttattaatgctgttatcctttagggaaagcaccctttttctgtggtttataaaatgccaacaatgcatggaagcctatcaatttttttgtgtgtgtttgttataaagtcgataagtaactaatataactaaaatagatgtctgaatttttcaatcataaatgtaattttaaaaaattgattaaaataatatatacccaaatagtttggtacattgagagctaagataagtttcctaaacaaaaaaaggaactcataatggttattgtatgctaatagtaagatagacaattcagatcactatgcgaattttaaatagtttccaaataaaatctagtttggtaactcaacatactatattaccaaaaaaacccacaaatataaaatttattagcatgataaattattttaatcattgtaagggcacttctgacaatgaaaagtaccatcaaattttattaaaccaattataaaaatctaaacacaccacttcaacattttaaaaatataaacatttttagccatatgccatggttttatacatttttcttcagagaagtaaaggaacaatacctacgaaggagaacttttctatatactattatactatactatgctaggcaatacaaataaaatgcaattttaaaacctaaatatatttgtaccttatcatatctcacaaactatgtccatgtcaccaattggagaggtggatgcctcaattataaagctgaatactcctgtggttgttagatcacagtaattggccagaggatttgctttagatatccattaaaaaggcagccttgttatactgtgatttaattacatgaaaaagaaaacaacttttattttagttatacttttccatcgacatctagtcatataaaagccttggttcattctcatgcccctcaaatgctttggtttagtgcacagaaagttttctttttaactattatacgattaagtatatccttatgaatgatcagaagcatctgggaaaggtggaagtgaaaaaaatcctcactgggaaagttagcttaatgcttaccttcagagtagcccattatcaacatttcatagtgggtttctttattttcaggtccctcaggtatgtgcaataaattatgacttgaactaaacaagtcacacttggctccaaaatgaaattttcctacctctactttctagtccctaaggtgggaagaggaaatcctggtcacagccaaaggagtcatatttttggctctaacatacattttccttcttctcaaaaagccaaaccctgctattgagactgcaaagtcttatgttagtattttaaactgtattttaacttttacttccataatctttctcaaatttaagaaaaaattttagtatcataaaattaatgtcactgccttctttttcccactcaaatcacttttctgactcaatgatcttaacctttttaaatatgaagtcaaatgaaatagacaaaataatgcagaaataggttgtttcgtttctataaggtagaacatttaaatttttatttactaaataacttctacttattagactattaatgtaaaagaaaactataaagttctaatttaaggtcctataatttgaagcatagttttagttttggaagagccatctatgtaggtcatttagatcatcatctcttttcatagggaataggagtatggcagacacaccctaaggtgatatacagagagtcacaactttgtaatgctctccccttaagtgagggcagaaccagtgatttgcttctagccaacagaatatggaaagggttctgggatagtcactcttaattaggttatattatatagcaaaaatgatgggaagttattcccatgattttttaattttatttttttcctcacaattttattaagttgtgtaagactctgtattggctgactggggctagagagcttcctattggcctctggaagtatactgtcatgatacgagggggcttgtgaaaaggccacatggcaagaaactgtgaatagcttcttgaagccaagagtacaccttagggctaggcacggtggctcacacttgtaatcccagcactttgggaggctgacgcgggtggattacttgagctcaggagttcgagaccagcctgggcaacatagcaagatcctgcctctacaaaaaaaaaaaaaccacgtttaaaaattagctgggtgtggtggcgtgtggctgtagtgccagctacccaggaggctgaggtgggaggatcacctgagcccgagaggccaaggctgcagtgacccatgaccgcaccactgcactctagcctgggcaatggagtgagaccctgttttcaaaaaaatttaaaaaagactgcctcttggatggattaggaagaacctcagtcctacaaccacaaacggaccccaagtgccagataacaacacaacctggccaacactctgattgcagcagttttgtggaaccctgacccagctaagccatgcccacacttgtgaccaatggaaactgagataataaatgtgtgttaagccactatgtgataatttgttacacagcaataaaaaactaatacaggctgggcatgatggctcacacctataatcccagcactttgggaggctgaggtctgagcatcccttaaggccaggagttcaaggccagcttgtacaacatagcaagacctcgcctctccaaaaaaaaaaaaaagtttagccaggtgtggtggcacatgcctacagtcctagctacccaggagactgaggcaggaggatcaattgagcccatgagctcaaggctgcagtgagctatgattgtgccactgcactccaacctgggcgacagaacaagaccttgtctataaaataaaataaaaatatttaaataaataaataataaaagagggatagctaatatagtcaatataagatactccctccacttattatgttctactatgtattaaataaagtgtaagatgctgttgaggattgagcattcccttctacatatcctctaatgatttactactataactaccctgtattgcctccttatgagtcatatcactgtttactaccatcctgttcattattatctaatgattactatcatttccatccttaaagtctccaggaatggagagtggttgctgttgtttttaaaaacaaataacaaagtcaaatacaattttaacaacttctactaaaaccccattcaatcattaactaaaacatttattaaacactgtgtttttaggtaatatcttagttgtagagacacaaagatgctgaagaaattatccctatcctcaaggtacaccatgaaacagattataaaacatctttataaacactaaatatgtgctttaggaaataataaaggacactggtaaaggtaactgcaggtgaatactacaatatgcttttgaattgcaattcctctgttttccctatattatttaaaaggcaaatgcataaaaacaataattaaaaactaacagccacacaaagtataaagatggaatctgtgacaataacaatataaaaagggaggaacagagattcagatgatagttataatccccaaggtaaatactaaaaaccaaaaaatacatataaaaggaaagaagggaatcaaaatagtatactacaaatcaactaaatacaaaaaaggaaatgatgaaggattgaggaacaaaaagcacatgacacaagaaaacaaatagctacatagcaaaagtaagtcctttcctatcagtaattactttaaatgtaaatggtttaaactctccaattgaaaggcagagattggccaaatggatttttaaaaacctgatccaactatacgctgtaaataaaagattcacttagatataaggaaattggacctcaccatatatcacatagaaaaatttactcaagaggaatcaaatatctaaattaaagagttacaactataaaactcttcaaggaaaacattaggggcaaatatgcatgatgttggatttgccagtattttcctaaatatgacaccaaagcacaggcaacaaacaaacaaaaaaaacagataaactggactgcattagaattttaaacttaacttttatattccatagaggcatacaaatattttcaaatacttgtttaaccatttataaaaatgttaagaaatcacccataatgatgctctgacatatttcaagtattttaggtattgactgctatattctgggcatttccaaataataaaaagccttcttaatcattataaaaactgcatgcgtatactcttaaagcttgtaacacaccagtcttataaatggataactaacaaataccttttaattatgaaaaaatgcgatagttgaggacttctttttgaagtcatgattctaagtcctttgccatgtgcggtagaaattatcccttttctccccttccttgactttgagattgtgcatggacgtgttttgggcaacaggaggttagcagatgtgatgtaaataggtatttgacttaactgcttacagttaagcctgccctcttgtactactgccattgcaataataacatgccttggctagtctgttggtccacaaagaatgaaatacaggtggaacagagctgactcagttgacttcaacacagatcagccaactagggcagagtagctgagcccagctaaaatcgagagagccaaccaaccaagcccaagcctagatcatctgtcacccaatcactccagagatgtatgacctgtaataaatgattgctgttttaagtcactaagttttggagttgttacagaagaagaactgatccagacatatggcaataagaaatacacttcccagtacatctagtagtgctggtaaataatttcactttttctatcccttgtccctgcagcttgaactattcttgtgtccactctacttgtaccttttgggaaccactagggataaccctttagaaccaccttcctcccctctacccagaacccattgatgcttctgttattttgctgttttatgcacataagcagaactatgacaaataggatcatgactgaggaatgtcagagtaggccatcaggtgtcttttttgcatgacagactgagatattgtctaggaagaatttatcctgaggaaaaaaagcattaagaaccccagattggtataataacaatgttcaaaatcatagctgttgaggcaaaggtggagaaaagagaaatggaattttctcacaaatgtatatttttaattttaagaatttttggaaaataatgaagaataacataataaatacctgcattctcatattttcttgcagcttattttcctttactaaaaattatggaaaaagttaaaattcttttgataactactctgaatatcattcccttctcttctcctcatatgtaatcagaattataatcttgatgatcctttcaggccttgttactttgtacgtataatatttagtacaacctagtattagccataaagtttttcttcttttccaggtctcaagaactcatatgtagggtccaaggaagagagaggacataggcaaaaatggaaataattagttttagggaacaaaattgtattttattaagatattggaagaagatgtggtctaaagaagggaaaaggattctttccactttaacaaagcagccttagtgcaataatgtagagctagagtaaaatgataagacattaaaaggagacaataccagtaccaacagcagtgccatcagtagcactctacttcagtggaatgcagcaccaatgctgttgatggtgacagtagatttcttgggtagatgtcaactgtttcatcagtagctgtagtcaaggcagcatcagccattttagaataggagacccagctttgggcatagccattagtgccctcagcagtagcactggttaactggagaaaggtagtagaaaccaccaaagttactggaggctgaaaaagtattagactctgaatcatcaagtgagataccccctgaggactttcagaaattttgaagaggtccagaggttacggaagagtaagggctaccaaaagaaatactgcttattactgttaatgttacctaaagactgctacggactagaaaaataaaagaaaaattatctaattcacagtacctagtaaagtattaacaattaaaaagataactattctaatgaaagaactcctgctttggtatgagaccctaactgactgtatcctagggggagggatataggtcataatcaataagtcagctcagtggtcagaaaatctcaaattttctcagattgccagcactttcaaatgcctgtaggaagtaaaagaaaatcctccttgatgaacaataagttcaacttaggctcaaattattactatagtttttcaaatatattgtttaggaaacagtcagtgataatgagatacaactgtttctggccaagattgagtaactggtttaagaatatttcttccattgtaagtaatcgcataaccgggcaaaatggagcaattgttttcaggtagtagacaccaaacagcacaagacagtaattctggagctaagtggaattcattaggtgaactccattatcccagttctctgcttgggtataatttcctgaccacagcacagagcattaaagtacaagcagagcgcagtggtcctgttgagctgaggtggaagagatcagaatatggagtgactaaatcacaagatctgcaaggcaggacactggaaagaagcgagccagatggacaaaagaccccaggattccccggaggaacccatgagtctgtggttaaaagactgataaaacacaaattgctgggcttcacttccacagtttctgatttggcaggtctggatgagcctgaaagtctttatttctattaagttcccaggtgatacgaatgcacctggcccaggaccagactttgaaaataactcctgttgaccaaagacagtataagttgaaaataaaataaaatctgtatctactaaatttttctcactcattcagattcaccaaagatttaaaaatgtctaaggatacaggaaaacatatacaggcatccctgagagacattgcaagtttggttccagaccaccccaataaggagaatatcataacaaagtaagtcacatgaattttttggtttcccaacacatataaaagctatgtttacactatactgcagtctattaagtgggcaacagcattatgtctcaaaagccaatgtatataccttaacttgaaaatattttattgctaaaaaaggtgaatgatcatctgagccttcagtgagtcactctctttgctggtagagggtcttgcctcaatgatgactgctgactgatcagggtggtggttgctaacgttggagtggctgtggcaatttcttaaaataagacgaccatgaagtttgctctatcatgtgactcttcctttcacaatagatttctctgtggcataagatgctctttgatagcattttacccaacataaaacttctttcaaaattggggtcaagcctctcaaactctgccgctgcttcatgcactaagtttatttaatattctaactcctttgttgtcatttcaacaatgttcacagcatctttactaagaatagttcctatctcaagaaaccactttctttgctcatccataaaatgcaactcctcatctgttcaagtgtcctcatgagattgcagcaatttagtcacgtcttaagctccacttctaatttagttctcttattatttccaccacagctacagttacttcctccactgaactcttaactccctcagagtcatccaatgagggatggaatcaatgacttccaaactcctgtaagtgttgatattctgacctcctcccatgaatcatgaatgttcttaatggcatctagaacggtgaatcctttccagaaggtttttaatcgactgtgtccagatgcatcagaggactcgctatctatagcagttatagcctcgtgaaatgtacttcttaagtaatgagacttggaagtagaaattactcctttattcattggctgcagaatggatgttttgttagcaagcatgaaaacaacattaatctccttgtacatctccatagagttcttgagtgaccacatgtgtggttaatgagcagtaatattttgaaaggaactgatttttctgaggagtagatctcaataatggacttaaaatattcagtaaaccatgctgtaaacagatgtgctgtcgtgcaggctttgttgttccatctatacagcacaggcagagtagatttagtataattcttaaaggctctaggatttttaaaatgttaaatgagcattggcttcaacttaaagtcaccagctgcactggcccatcacaagagagtcagcctgttctctgaagctttgaggtcaggcattgacttctcctctctagctatgaatgtcctaggtggcatcttctttcaatagaaggctgattcttctacactgaaaatctgttgttttgcgtagccaccttcatcaattatcttggccagatcttctggataacttgctgtagcttctccatcagcacctgctgcattaacttgcacttttaagttatggagatagcttctttccttaaacctcatgaaacaacctctgctagcttcaaacttttctgcagcctcctcacctctctcagctttcacagaattgaagagagttagggccttgctctgaattaagttttggcttaagagaatgttacggacagtttgatcttctttccagacactaaacctttctctatatcagtaataagactgtttgcttattatttgtacattcactggagtaacacttttaattcctttgaagaacttttcctttgcattcacaatatggctaattggttggtgcaagaggcctagcttttgtcttgtctcagctttcaatatgccttgctcactaagcttaatcatgtctcgcctttgatttaaagtaggaagcatgcaacacttcctttcacttgaacactctggggccattgtagggttattaactggcctaatttcagtattgttgtgtctcagggaatggagagtcccaaggagagagaaatgggggaagggtagtcagtggagcagttagaatacatacatcacttatgaattacgtttgctctcttatgtgggtacagtatgagatgccccaaaacaattacaatagtaacatcaaagatcacttatcacagattaccctaacagtataataataatgaaaaggtttgaaatatcgtgagaattaacccaaatgtgaaacagaaacaagtgaccacatgctgttggaaaaatggtgctgaaagacttgcacaatgcagggttaccataaaccttcaatttgtaaaaaagcactataaaagcaaagcgcaataaaatgagggatccctgcaattaactttatacaaaaccaatgactcctgtaataataaaacttaaggttttgatggcctacctgtagatctttcacatttggaaaaggaattcctattgttatgacagcacgggcattgtcatctgagaaatccagaccctcactcactttaccacgacaaactgctaccaggagagctccatcttaaacaacagaaaaaagcatatccaaaattctcagaaattgcttattcttgtcattttgaaaatacctgatttataattatagtaattacagtagcaaatttaaaataatcaaaataaaacactattatgagataaagttttaaaagttcaatgtctttaagtaaataaggggaacaaaattacatttatatgcaaaagggtagcaaaccaatttacaaactctgcatcttccagataacttatacagtaaaaacatgtcagaatagcaacttgcatatgaactgtgtgattataaacaggtttatttaataaaaattgaagttgcattattacctttaccacctgaaagtaaaattctcagaataattgaaataattgtaattgataatacatatcatatggaatcaatatatttaaaagtattgaaaacagacacagagaacaccataatatatacaccataaaaagatactgatatgttatattacctctttcttgcattgttcataaactactactatcccttcacatcaaacttttttattttattttattattttttgtgtgtgagacagggtctcactctgtcagccaggctggagtgcagtggcacaatcacagctcactgcagccttgacctcctgggctcaggtaatcctcccacctcggcctcctaagtagttggaactataggcacatgcaccacaccctgctaatgtttgtactttttgtagagacaggatttcaccatgttgcccaggctggtctcgaactcctgggctcaagtgatccacccgcctcagcctcccaaagcgctaggattacaggcaagagccaccacgcccggcctcacatcaaactcttcatggatatgctctaacttggaattgagttttcagttatgttttgaaaattcaagtttaccttatgtaatagaatacaagcaccaagtgtactaaatgcatcagaatataggtctcatttggctagtaaggaatatatttatatatatcctaactgcctttttgcacaaactatttcaggtagtgcactgaagactgtgagatgatggcatcgtttttcttaaagttgaatcagcatactcaagtgaaaatattcataggagaacaagtacaattaaaagaatttctttacccaatttattttcttttcactcaggattataatttttctcttaagtgtaattcatctaaaaatataaaattataattgtaccttcttactttgtaataaaaaatattttttcaccgaccatgaaataatttccagttacctttctctcctttgtatttgattgcgtcatagtacacctgcagtaattcatcaaaatttgttttttctcctccctgtggttctacaatgactgtcttcaccaactccagattatgccataaaccagtagagagccaacgttcttttaatttttctaataactaaagaggggaaagaaaaaaatgattttttgtgtgtctagctaaacaaacttaacttcatttgtttaagccaatgtgactacggcaagtatattaatctctctgtgtcttttctcatttataaaatgaggaaaacaatatatctcatagagctgttatggggttaaatttattaacagatttagagagatctgaatggtgctggcacagttagctgctgctgctgctactactactattatcttggcaatttctaccactactactgctactactactattactactactacttctactattatcttggcaatttctaccaccaccaccactactactactactactactatcttggcaatttcaaaagcaaaagcaaaaaacaaaaaacctctgtcaaagttaacaaactttaagttctctctttaaacctaaggtgaagtttcttaatattcttaaatagtcttcaaatgaagatgatttaagatcattttactaagtgtataggcagataagctcattatttgaatatttgatcatcattaataacctgcattgaaaaaagatagaaataaagactcagccaagaagtagaaaatatatgggcacaaatggaacatttacagccatgggctagattacaaaaggacattcaacaaattttaagcaatccttatcatattgatcacatatttcaacagttatgccatggtagattaaaagtcaataatataaagtcatggtagattaaaagtcaagcccaaaacaaaaactcatcttgattgattgattgattttagagacagggtctctgtcacccaggctggagtacagtggcaagatcatagctcagtgcagcctcgaactactaggctcaggcaatccctccaccttagcctcctgagtagctgggactacaggtgcatgccactacacccagctaatttttatattttgtgtagagatgagatcctgctttgttgcccaggctagtctcaaacttctggtctcaagggatcctccagactcagccttccacagtgctgaaattacaggtgtgaaccaacacacgtggctgtaaaactcatattcttaaaaaccatatgagttaaatagaaaaaacacagtataactcatgaaatctttagttatgaataagaaaagcactcacaattcgaaacatgtggcatacagcaatggcaatacatggaaatacatttatagctttaaatatatttatttttaaaatgtcaaaataaaagaatcaagtattctttccaagaagctagaaaatgaaatatagcaaatgcaaagaaagaagttaataataaagctgaataaatgaaaaagacaaaagctaatattagagattattatttaaattgaactgttttatccacttgttatatactatgagttctacacaatttggacaagttattataagaaaccacccaaaattctctggaaaacagcaactgatcaatttttataagatagtttatttcctcaattttacctttaactatttttagaaataaacttcttaataagactataaaacaaaacattagtaaaatagttaactgctgtacaatatgctttaattaaataggaagaactactttaattccataaacacagctaagaagttattatattactttttattctccagaaagacatcaagggaggaatagaggaacaaaaaagctgtagttagacagaaaacaattattgaaatgataataatgtctttccctatcggtcattactttaaatgtaaatggattaaattttctaatcaaaagatataaagtagctggatagataaaaacgctgtctgcaagtgactcactttaaatttaaggatacccataggctgaaagtgaagggatagaaaaagatattacttataaatggtaaccaaaagacagcagaggtggcaattctaagatactaaatagattctaagtcaaaaattgtcacaagagacaaaaaaaaaggacattatataatgataaatgggtcaattcactgggaatatttaacaactataaatatacacacaaccaacatcagagcacccaaatatagcaagcaaatagtgattgtactgaagagagaaataaacagcaatataagaggagtaggaaagtcatatatctaaccttcagtaatgaataaaacatccaaacagaagatcaacaaggaaacggaacttgaacaatactagagaccagatggacctgacatatatagaacattttacccaacagcagcaaaatacatattcttcacaactgtacatggaacattctctaggacagatcatgtgttaggtaacaaagcaagtcttaacaaatgtaagataaaaattaataccaggtatcttttgcaaccacaacagaatcaaactaaaattcagtatcagaaagaaaaccagcaaatttacaaaaatatgaaaattaacacacttttgaacaaccaatgaatgggtcaaaaaagaaatcaaaaggaaagttatgaaattatcttgagaccagtggaaaaaaaaccacaacataccacaagtaagaaatacaccaaaagcagtactaagaggaaagtttatagcggtaatgccaacattaaaaaagaaagatctcaagtaacccaattctacacttcagggaactagaaaaagaacaaagtaaatacaaagtttgcagaaggaaagaaatattaagattagagcagaaataaaatagggaacagaaaaacaatttaaaaagttggtttttgaaaagatcaacagaattgacaagtctttacctagattggttaaggaaaaaaaaaagagaaaatcagaaatgaaagaagacacactgatgccaccgatacaataaaagactactctgaaaaattatatgccaataaattggataaaatagatgaaatggacaaattcctagtaatatacaacctactaagactgaataatgaagaaacagaaaatctgaacagactagtaaggagactgaatcagtaacaaaaagtctcccatcaaagaaaagctaaggacctaaatggcctcaataccgattctacaaaacatttttatttatttaattttattaattttttattttcatttctttgctaattaattaatttatttttgagatacactcttgctctgtcacccaggctggagtgtagtaatgtgatcatagttcactgtaacctcaaactcctgggctcaagcaatcttcctacttcagcctcccaagtagctaggactagaggcatgagccaccatgccctggtaattttttttttttttttgtaggtatggagtctcactatattgcccaggttggtcttgaactcctggcctcaagtgctcctcctgccttggcctcccaaagtgctgggattacaggtgtgagccactatgcacagtcctctatgaaacatttaaagcaggggtccccaacccccaggccacagaatactggtagaatccaggctgcacagcaggaggtgagtggcaggtgagtgagcattactgcctgagctcagtctcctgtcagatcagcagcagcattatattctcataggggtacaaacactattgtgaactgtgcttgcaagggatctaggttatatgctccttatgagaatctaatgcctgatgatctgaggtggaacagtttcatcccgaaaccatcacccccacccccaacccaggtctgtggaaaagctgtcttccacaaaaccagtccctggtgctaagaaggttggggaccattgattttaaagactaatacaaatgtagattcaatgtaactcctatcaaaatcccaatgacattttttacagaaacagaaaaaaatacaaaaattaatatgcaaccacaaaggacttggaataatcaaaacaatcttgagaaagaacaacaaagctagaggcatcgtgcttcatgacacttacatcttacaaacccaccataatcaaaatagtaattgcattgccataaagacagacatatagaccattggaagagaatagagagcctggaaataaatccacacatgtatgatcaactgatcttcagcaagggtgccaaaaatacataatggggaaaggacagtctcttcaacaaatagttcagggcaaacaatatccacatgcaaaagaataaaactggacctttatcttacacaatacacaaaagttcactcaaaatggattagacttaaatgtaagatttcaaactgttggctgggcgcagtggctcatgcctgtaatcccagcactttgggaggccaaggcgggcagatcacgaggtcaggagattgagaccatcctggctaacacggtgaaaccccatctctactaaaaatacaaaaaattagccgggcatggtggcgcacgcctgtagtcccagctactcgggaggctgaggcaagagaatcgcttgaacctgggaggcggaggttgcagtgagccaagatcacgccactacactccagcctggcgacagagcgagactctgtctaaaaaaaaaaaagacttgaaactgcaaaactcttagaaaaaaacacaggagaaaatttttgtaacattggatttaacaatgattttatgcatatgacataaaagcacaggcaataaaagtaaaacctacgattgggaccacaacaaactaaaaggtttctgcaaagtaaagggaaaaaaaagagtggaaaggcaacctaaaggatgagaaaaaatatctgcaaaccatatatctgataaggggttaatatccaaaatatattaagaaacccaatattaaaaaaaaattgaaaaacaggcaaaggacatgaatagacagttctccaaagaagacatacaaatggttaacaggtatatggaaagatgctcaacatcagtaattatcagggaaatgcaaatcaaaaccacgatgagatattggttcacagctgttcggaaggccattatttaaaaaagtaaataaaataactattagtgaagatgttgtgatattggaatccttgtgtattgctggtgggaatataaaacagtatagccactgtggaaaacagaaaaggaaataaaaatcaaaataaaacagtatatatagaaatgttttatgggtttcaatatacaagtcttttacctccttaagtttattcctaagtgttctatttgttttgatactactgcaaatggaaatgttttcctaatttgcttttcagacagtttgttgtcagtgtatagaaatacaactcatttttgtatgttaattttgcatattgcaactttactcaatttattagtcctaacaggttttttaaaaataagatctttaggaaagatcacgtctgtaaataaggacaattttactttttcctttcccatttggaagacttttattcctttttcttgcctaactgctctggctaggaattctagtactacgttatacagaaatggcaagagtgggcatccttgccctgtttctgatcttagaggaaaacctttcagtttgcaccactgagtatgctacgagcttcttacatatgacctttattatattaaatttccttctattcctaccttgttgagaatttgtatcatgaaagtgtgctgcattttgtcaaatgcttttttgcattattgaaacaatgcatgaagattcttttcagcagatggtgttgagaaaactggatcaccacatgtaaaaagaatgaagtaacaccttgcctacataataaaaattaactcaacattggtcaaagacattactgtaagagctaaaaaatataaaactctaaaagaaaaaaatagaaggctttatgaccttggatttggcaatgatttgttggctgtggcatcaaaagcataagtaactaaagaaaaatacagataaactcggatttcataaaaaattataaaacttttttggatactgtcaagaaagttaaaatgatagtacacagaatgcaaagcatatggctgataaaagattaatatccagaagatataaagaactacaactcaacaacgaaaaaaccaaacagattcaaatataggcaaaggactttaatagacatttcttgaatgattaaaaaaaaaaaaaaggcccaaaggacatgaaaagatgctcaacatccttagtcattaggaaactgcaagtcaaaaccacaatgaagtcccacttcacttagtataactgctgtccaaataagtaagtgttgcaaggacacgcagaaactgtaactgtcacacattgctagtggcaatgtaaaatggtacaactgctgaggaaaacagtctggcagttcctcaaaagttcataggcatagaattaccatatgatccagcaattccactcctaagtatataaccccaaatatctgaaagtactaggatccaaacaaacagctgtatgctgatgtttatagaagcattattcccaataaccaaatagtggaaacaactcaagtgtcaatcaacagatgaataaacaaaatgtatgacctacgtgcaatggaaaattattcaactataaaggaatgaaattctgacaaatgcttgaatatggataaacccatagtaagtgaaaaaagccactgtatttttgtacacaaagtacaaatattatatgatttcacttatatgaggtacctagaatagacaaattcttagagatgggaagtagaacagaggttaccagggcctgagggaaggggctaaacaggagtcattgttccatcagtacagtttctgactgggatgattgaaaagttttggaaagggatactggtgatggttgtacaacatcatgaatgtacttgatggcactaagttgtacacttaaaaatgcttaaaaggtaaattttatgtcatgtgtattttaccacaattttaaaaattgaaaagaacacacaaatgaatactatttagtaacataaataaatgaactagtttctcacatattaaccaggatgaatcataaacttctagatgttgagtaaaaaatgcaaatacagatagataacaaatatgatttcatttatataaagttcaaaaacaatatgttctttgagaaaaatatatataactttaaaaaactcatgaaactaatacctttagctttagggggatacaattgggaaggaacaaatggaggatttttttttttgagacagagtctcgctctgtcacccaggctggagtacagtggtgcgatctcggctcactgaaatctccgcctcctgagttcaagcaattctcctgtcccagcctcctgagtagctgggactacaggcggacaccaccacacctgactaatttttgtatttttagtagagacggggtttcaccatattggtcaggctggtctcgaactcctgacctcaggtgatccacccctcagcctcccaaagtgccgggatcacaggcatgacccactgcgcctggccagatggaagcttctaatgtagaaataatgttctatttcttaagctgggtgatggatactcagatctccattttattattatttaaaatgtacatattagttttgtagacttatatacacacatatttcacaaatataaaatataaaaattaaacaacattagtctgattattaatatgatgagttagaggaggggttataacaggtacatttaggctactaatatagtaatccagagatggtggtagcttgaattagaaagagttaagaaaaaaaatgcaaaccttgagaataagataaaaaagaaacagtacaaactttccatttcaaatggaggcaaaggcccactagaagattatctagggaaatacactttgttgaactcactgttcactattaattaaggttccagacttagcaaaattatatttcaacttagatatttttgtctaatacaaatacaaatcatttctgttcaggagaaaagataaccctaaaagttactatttattgccctgtagtacatcaaccagttttcttatagtctattcctttattaaattgcctacaagtacgtgaatccttaaatgctctctgaataggccaatcatcatactttttcttcattaatcagtgagtttaataaaatctgtgataggtgttaactttatatgtgagctatgactttatctttttgaaaattaactgtagagaaagaaaagtgaacagattataaaaatacttaaaattaaaatgagtaagatatggtgttggatgggacatgacagggaagggagaaaaaggttcacaggtgctctgtaggtatatgattagcccaaatatgattacagtacctgctatgttttgaacatttgtcctctccaaaatgttgaaatttaatctctaatgtggcagcattgagaggtgggggattttaagaggtgacagggtaacaagagtgctgccctcatgaatggatttgtccagtcatgtattaatggcttatcatgggagtgggactagtggctttatacaaaaaggaatagagactcgagcttgtatactcagcctccttgccctgtgatactctgagccaccctgggactcagcagagagttcccaccagcaagaaggcccgcaccagatgcagcctctcagtcttgaacttctcagcctctgtaactgcaagaaataaattccttttaaaaaataaatcacccagtttcaggtagtctgttacaagcaacagaaaatgaactaagacagtaccattcattcatacaggcaacactggcaaaggaccaagactggaaggaaagattaaaagtttgttgcctttaagatatccaaatggaaatgttgatatggcagttgggtatatgggcatagtacttaaggaagaagtcagaatttaattatatattaggaaagcatgacaaaagataaaactaaaaaagaatgtatagagatgagattgcctagtgggagagtacagatttaaaaggggggaccagcaagaaaatcttatttcctctccatttttttttttttttagagatgggatctcactctgttgctcaggctgaagtgcagtggtgtgatcacagctcattgtagcctcacattcctgggctcaagcgatcctcccacctcaacctctcaagtagctgggactacaggtatgcactgccatgtctggcttgaaaagaacaacaacaacaacaacaacaaaaaaccagagagggtcttgctgtgttgccaaggctggtctcaaactcctggactcaagcactcctccaccttggcttcccaaagggattatatgcatgagccaccacacccagcccctcatctctactactgctcatccaattcatcagcaaatcctgccagcactacttttaaatttatctagactctaaacatttctcactatctttactgctaccacagtggtccaagccaccaccatctatcatctagattacagcagactccttaacagtcacccttgcttcagcctatgctctctacagtccattttccatacagcagccaacataatccttttaaaactaagtttaaaccctccaatggcttcctactgcatttagaacaaaatctaaattcttactgtggtgtgattttacccagctatttctttggccgtatctccttcaattccccatacttcagtcctactctgctacaatggcttccttttgctcaaactaggtactctcctgtctcaagattcccactatctgaacattcttccccctaaatcagaatggtttgcttcctctcttcctttacacttttactcactgtcaccttctcagataggccttcccaaaccatccaattaaattctaaatgagcaccctccagcccccacccaaaaaaattccaaccccaggatcctcttttccccctttccttgctttagttttctacatagcacttatcaccatctgtattagtcccctcaggctaccacacaaaaatatcagactgaatggcttaaacaaaagaaatttatttcttacagttattagtttaagccacagattgagtggcttaaacaagagaaatttatttcttacttcttggctatgaagtccaagataaaggtgcctgttaacttgatttctggttagggctctcttcttggcttgcagacagccaccttctgtgtcctcacatggcctttcctctctattcagagaggaacagggagagagagcaatgaagttttctggtgtctcttcttataagaacactaatcctatcagataaggaaggcccttacagcctcatttaaccgcaattacttccttagaggccccatctccaaatataaccacactgggggttagggcttcaacataaaaaatttggtggtatacaaacattcagtccataatatcatctaacatattagtagctttctgtgtctctcatttattttctgtctctcaccctggaatacaaaaggacaatgatttttgtctgttttacttactgctgattgcccagtgcatagaacagtaccttacatatagaaagtggtcagtaaatactttttgaatgaattttataaatgaatgaaaaatgaaggtccaaaacaatggaaggtcagggaggagagtagggaggggtaaaacataactgtaaaaccagatgcccaagtccttaataaaagaagagttggctgggtgcagtggcccacacctgtaatcccagcactttgagatgctgaggctggaggatcacttgagcccaggagttcaagaccagcctgggcaacttggcaaaaccctgtatctacaaaagtacaaaaattagctgggtgtggtggtgtgtgcctgtgatcccagttactcaggaggctgaggtgggaggactgcttgagccctggaggttgaggctgcactgagctgtgatcatgccaccgtactccagcctgggtgatagagtgagaccctatctgaaaaaacaaataaaaataaaatattaaaaataagagtatccagatgctttgtaagatgacaaagatgagggggaaagaagggtatgactaaaagacatgagcaaacagactagctagactagactagttttctcttggtgagactttgttcattcattccttcctcccttcctttcttctcccctcccttccggaagaaaacagacaggtaaagatttagaaagaacaatggagagtaaataggatactaagtctgagatactgcaagttacgagaggaaaggatggtcacaatttggaaggtctgacgaagtggtatgtcctctgggtctatccggattttagttcgggcaaagagctatgaggaacacttcataaaagggagaatttggtgactatgacacatttccacagaacacaatgtgttttattttaatttcttcagtggagattttttttaaagtaccttaaaaccttttgttaaggattacacaggggctacatgcaaatttggagtacaattctatagcaaaaacatactggttattttagtgaaaatggcctacagcaaattttcagtttcagataacaaaatatttaggtctacagcttttatattctcattgcaggtgacacttgaattacacatttagacagcttaactatttctgtcttgccagagaaatcacataaataaacacaaaaataactcaattgttaaattctcttaggtatcctaactaggcacctaaaaactaacttaaaggaaagtacgatgacacagagctgtctctcaggtcttatggcttacatatatgaaaaatgtgaggtatctttgttgaaaatatcctacttaatagctcataaagggtaaatactattcatatagggagaccagccaacatatagtgatagagatgatttaatttactaattggtgttcacatcacttcaatttgttaacctcagaggcaattttttttaaagtcagatctcacaaactaaaagacactttagaatgcccatgtcttatctggatattgtcattttactttgtcaaacttctttaaaactagtatttcgctagggagggaataagttagaatgcaacctagtggggaaatcctgcatttgctcaatgtccatagcttttacacagttccagatgttcagtacattaataatacactaactcaaagcctctttttgaaactttagaaagtgcaaattgcattaagacctctttgccctcattagtggtattgttacaatcccagtcctctggaaaatgttttttggcatgtgtttaactttataatattgccatttactcactttaatagccagtactcaagtcttaatgcttttaataggcctgcctaaacagactaccatcttttgtaatcttactcacataatttatttcataagtagaacctggtatatttttccatctaaagatgattcttcattattcatttcatgaggtactcatatgttttaaatgtttactttcttttattcagttgatatgtacccatatgtggcatatgttagaaataaaaaagagttccttttaaatactaataaaaatgaaaaagtagtagtgttttttaaataacttttttagttacagtaaaaatgaatgtccttaatttttgctaaatacaaactgaaaatataagaaaaccaagaatatgaatttctattgaaacagcttcctgtttggtgatatttgactcagcactttcacctcaagaggctgggttatatttcagaatcaaactttcaatgaacacaggtgcagttggaggtgcacttggaggaataatatagacaaatactgccctaaagtgaaagtaagacctctgttggcaatctaactggaaatgaagatcctacagccctctctgaaaaggaacactctctctcataaattagttaaaatactgaggactctgaaaatgtcagagctgcactactagtgcagtaatgcactagtgacacctgatttacagttacttcttgatacattctgataaaaatatacaatgatatttacaatgcaaaaaacttcaaaaaatgacatttgtaaaacaactaacatatttacacatgaaattctactttcctgaaatcatgtgaaaagaaaacaataaaagccagacgcggtggctcacacctgtaatcccagcactttgggaggccaaggcagacagatctcttgagctcaggatttcaagaccagcctgggcaacatggctaaaccccatctctacaaaaaaaataactgggcatggtggtatgttcctgtagtcccagttacccaggaggctgaagtgggaggatcacctgagccagggaggtaaagactacagtgagccagtgattgtaccaccacattctagcctgggcaacagaatgagacactgtcttgaaaaaaaaaaagagaaaaaagaaaagaaaacaataagaactcaatactatgttatgtatggaacaaattcttaactctttgaaacataaattctgaattactgttgtttcatcaacagttaattcatcaatgtctaaagtaatcatttagttaaaatgtatataatctgacttgttttgctttttaaaaatgaagaactgttgactgagttaataatgttggctaaaatctgaatgtataaacttattcacacaaattcaactatatgtttcattcttttcctgaatagattaactgtaggcgaaaaaggcaactcgttttctatacttctgtaaatgggctaataattaaactataatgaagtcagtgctcttgcactattagaattcaggctgagggaagcagatgaataagaagcaaccactataatgttacctaaaagttactactttcaagtattgccatctgaatctgctgtaaatttgttgctctaaaacttgaaagaaattttttggagaaagcatcgcttcacaatctagtgaataagatccaaaagaaaaatatttaaattacagtgcagtgcataacaaacatagaaaggcctcaaggcataccactacaggaaaccatcaaatcacaaaggaagacagcaagagaaataaagaaacaaagtacctacacaacaactagaaaataattcacaatgctgggtgggcgtggtcactcatgcctgtaattccagcactttaggaggctgaggcagaaggattgcttgaggccaaaggattgcttgaagccaggagtttaagaccagtgtgggcaaaacagcaagaccctatctctaaaaaaaaaaaagtttttaaaaaatgtatctgggtgtggtggcacatgcctgtagtaccagctactcaggaggctgaggttgatcccttcaacccaggagttcaaggttatagtgacctatgatcacacccctgcactctgacctgggtgacagagcaagaccctgtcataaataaataaataaataaataaataaataaataaatggcagtaataactctttacctttcaatacctaccttgaatgtaaatgaattacactctagcaaaaagacatagagtcttaattcccagagcaatttagaaagagtaagaaaagaagatccaactatatgctgcctacaagagatttgcttttaaggatgcacagaggctgaaagtgagcagctgaaaaaagctattcaacaaaatggaaaccaaaagagagtggggttatctatacttacataagacaaaatagactaagtcaaatactgtaaaaagaaacaacgaagaacattatttaacaaaaaaaggtcaattcatcaagaggatataacaattgtaaatacacatgcacctaacatcaaagtacctaaatatataaagcaagtattaaaggatctgaaaagagagatagattctaatacaataatagtaggagacattgataccccactttcaacaatgaacaaatcatccagacagaaaatatatttaaaaacattggacttgaataaatttagaccaaatggacctaacaggcatttacaggcataccttggagatattgtaggttcagtttcagaccaccacaataaagcaaatatcacaataaagtgagtcatacatttttgttacccatcatatataaacggttaatgtttatactatactgcagtctattatgtgtacaagtggcattatgtctaaaaaaatacataccttaattttaaaatactttattgctaaaaaaatgctgacacagagacatgaagtgagtacatagtattggaaaaatggtgacaatagacttgcttgacacagggttgccacaaacctttaatttatgaaaaaaaaaaaacccagaatatttgcaaagtgcgataaagcaaagcacaataaaataaggtattcctgtacagaatatcccattcaagagcaacagaatacacattcttctcaaataccataaaatagtctccaggatagattatatattaggccatgaaacaagttttaacaaatttaagtttgttatcatatcaagtatctttgctggccacaatggtataaaactagaaatgagtaacaggaaaatttgggaaaattcacaaatatatggaaattaaacaacatgttcctgaacaaccaaacaaccaagggggcaatgaagaaattaaaagggaaatttaaaaaaaatatattgagacaaacaaaaatggaaacacaacataccaaaacttaagggatgcagcaaacgtagtcctaagaggaaagtttacaataacaaatgcctacatcaaaaaagaagatcccaaataaataacattactcctcaaggatctagaaaaagaagaactaagcccaaaattaacagaaggaaagaagtaataaagatcagagaataaataaataaagtagagactaggaaaacaacacaaagatcaacaaaactatgaattggtttttgaaaagataaatgaaatcaacaaacctttagctagattaacaagaaaaaaagagaatattcaaataaaatgagaaacaaatgaggagatattataactgataccacagaaatacaaaggatcaaagtgactattacaattatatgccaacaaaataaactggatacctggaagaaatggataaattcctagacacatacaacctaccaagactgcatcataaagaaatagaaaatttaaacagaccaataatgagttctttccaatcaaagaaaagcccaagacctgttggctcactgctgaattctacctaacagttaaagaactaataccaatcattctcaaatgctttcaaagaagttgaaaaggaggatatacttctaaattctttttacatgaccagcattatcaccctgataccaaggccagataaggacaatacaagaaaagaaaactgtaggccaatatccttgataaatagaaaagcaaaaatcctcaacaaaatactagcaaaccaaattcaacaacacattaaaagaacaattcaacatgatcaaatgggatttatcactggatggaaagatagttcaacatatgtaaatcaataaatgtatacagcacattaatagaatgaaggacaaaaaccatatgatcatctcattagatgtagaaaaatcatttgacaaaattcaacatcctttcctgagaaaaacttttactaaattaggtatagaagaaatgtactgcatatttggccaataaaggccaaatatgataagaccacacttaacattatattcaatggtgaaaaaattgaaagccttacctctaagatctggaacaagacaaggatgcccactttcactatgtccacttaacacagtactgaagtccttgccagaaaaatttagaaagagaaagaaataaaaagcatccaaatagaaaagaaaaaagtgaaactgcccctgtttgctgaagacataatcttatatatagaaacccctaaagactacaacaaaaaactgttagaactaataaatgaataaatacagtaaacttgcaggatacaaaatcaacacacaaaaaatcagtagcatttctatatactaataacagactatccaaaaaagaaattaagagaactccttttacaatagctaccaaaaagagagagaaagaaagaaagaaatttaaccaaggtgaagaaaggcttgtacgctgaaatctataaaatgttgatgagagaaattgtagaagatacaagtaaatagcatgatattctttgctcatagactggaagaatattgttaaaatgttcatattacccaaagtgacatattgattcaatgtaatctctatcaaaattccaatgtcatttttcatagaaatagaaaaaagaatcctaaatttcatatagagccacaagaagctttgaatagccatggcagtcatgagtaaaaagaacaaaaatggaggcatcacacgacctgattccaaaccacactgcaaagctatagtaattaaaacagcatggtattggcataaaaaacagccacagtgaccaacgaaacaaagagcacagaaagaaacccatgtatgtgctcaactgattttcaacaaaggtgccaagtatacacaatgggaaaaaaagactctctaaaaatggtgctaagaaaattagatatccacatgcagaagaatgaaaatggacccttatctcacaatatttaaaaaaaaactcaaaatgaattaaagatttaaacccaagaactgaaactgtaaaactactagaagaaaacagaggggggaaaactacataacattggtttaggcaatgattttttggatttgatcccaaaagcacaggcaacaaaagcaaaaataggccaatgcaattacaacaaagagaaaacaataaacaaagtggcaacctacagattgggagaaaatatttacaagctatatatccaataaggagttaatgtccaaaatatataagaaactcaaacaactcattagcaagaacacaaataactcaatttaaaaatgggcaagggatttgaatagacatttctaaaagaagacaacaaatgaccaacagatacatgaaaaaatgctcaaaatcactaatcattagggaaatacaaattaaaaccatgatgaaacattaccttatgcctgtaacaatggctactgtcaaaaagatgaaagataacaaagtgttggtgaggatgtggagaaaagggaagccttggacactgttggtaagaatgtaaattagtacagccattataaaaaactgaatggacattactcaaaacactcaaaacagaattaccttatgatctagcaatctcacttctgagtatttacccctaaaatttgaagtcagtttgcagaagaaatatctacactccctcgttcactgtagcattgttcatttggctggaattggagaacattatgctaagtgaaataagccaggcacagaaagataaatgtctcatgcccttactttacgtggcatctaaaacaactgaactcaaagaagtgacagtaaaatggtagttaccagagtctggggcaaccacccttctactttctatctctgaatttgactactctaagtacctcatataagtgtaatagtgtatttgccgtttttatgacgagcttatttcacttagtctaatgtcctccagattcatccatgttgtagcatgaaaagaaatacccatttattatctcacagtctctgtaggtcagaagtccagacacagggcagctggtatgggaatgtggggaaggttgtgcatgtgtcgggtaaaggggtatatgagagctgtctatactgtccactcaattttgctgtgaacctaaaactggtataaaaaataccatgtgacctatggtattctctacattgagctgctatctgtagaatcttttccttgatgacttttttcctttatgatctctcatgttagcatgacttcaagctaacattatctacactaggcaagcaaggtgaatcttatttctaaaaactcctcagaaatagtactttgtacaaaggcaaacaaccaacgcactgatatgagctctaaccattcattcaccatgtcctgtagagactgatgtatcttttgaaagacttttcaaaaatgcaataacccttgagttaactagatatcttaaaatcgaaggctagagattgggagagttcgcttctataatttgcatctgctgtatatttgagaatatataaaatacaagaacccaaatagatgggtgaaactcttaaaatgttaaaatcgtagctagaagttagaaacctgtgtaagccatattaaagagataaagtaagtacagcatttctctatgaacatagatgaaaaaggatggaaagacactagatattcaagatacactacatatacatgaggtatcaaatatccaagatacattaaatatatctgaggcatataaaatactacccaatatccataaaatcttattcagccacccattggtgacacccattctggctccatgtatcctctgcccaagaaaggcaaataaaatacattgtagctcagcaggcaaactgatggactacagctgtggccaagtgcatttgcgctggccttactctaataaagtgtgtcaattgtgcatctgttgggtccccttgcataaacctcatttctagtctctgtaagcacaccatcagcaaaggagagctgatgtggaaaagagaaagacaagacataaacattgcacagcccaggatttaggtagtgtggtccttccacccacttacattgtattcacatgttaacctaccctcaactctctccccttgcctcccactgtgtgttttaactatctttactaaactatatgattcaagcatcccaatgtggtgtcacttttttgtcccatgacctctgggataagtatatttggagactaccactgcatcaagttaacgtccctcctgacaccacacaaatcatctaaattcaaaaggtgccaatatgaaactgtcagccaaaaaggaaaatcaattggttgctattatgaagattaactgggtagatattaaagattgtaaccaagatgaaacaactagaacctccaagtttttctagtccatatcaagctcaaaaattgctttaatatgtaaaatgtacagtaaattaatcataagttatatttaactaatttgtctgtcatttcccaaaagtgcttcctatatttatccttacatccatgaaaaatagtttagaactaagggggtggggggagcacagggagttaggatgaattcagcttctaaatttgctacttgatccctgcctgctatggtttgaatgtcccctcccaaagtcatgttaaaatgtaattgtcattgtaacagtattaacaggtgcagcatttaagagaccattaggccagaaaggttctgtcctcatggatgggtttaatgcctttaaaaaataaaggagctttttctttctgtgtcacttgccctttcacctttcacctcgagatgatggagcaagaaggcccttactagatgctggcaacttgatacttggacttcttagtctccagaattgtgagaaataaatttattttctttctgtccagtctgtggtattctgttatagcatcaaaaaattgaccaagacactgccttctcaaactaagttacctggacatccttgactctagtttaatcttaacttctctgcctttattctccctagatttttcacttaaaaattataatacatatacatacataaacacacacatacacatatacacatacatatgtatgtgtgtgtgtgtgtgtgtatatattatatatatatatatatatatatatatatatatatatatatatattttttttttttttttttttttttttttttgagacagagtttcactcttattgcccaggctggagtgcatggcgtgatcttggctcactgcaacctccgcctcctggattcaagcaattctcctgcctcagcctcccaattagcagggattacaggcatgtgccaccatgtccggttaattttgaatttttagtacagacggagtttcaccatgttggccaggctggtcttgaactcctgacctcaggtgatccaccctccttggcctcccaaagtgctgggattacaggcatgagccagcatgcccagcctaatcaatatatttttataaagcttttttgaaaccagatgtgatacaaatatattcatgttatttatagaaagtacataaatgactatattcatgcacacacacacacacacacacacacacacacagagcaaaaaacaacttggttattaaattgttactttccaactgccctactattttcattcaattgttaaagcagctttttaacatcctctttcagagtagctcttatatctatcttcctaacagtttagctcataatcaaaaacaaatgtgaaaagcaaacataaatataggtataccaatatgtaggtatttttatataagtgcatattgttctaaataaaaataataggtcaaattaatatttatcagatcaactatatttcaaacagtagaatactattacgaggatagcattgaactagaaaatcaggagttctaaggcaaatgctttcactaattaaatgtatgaccttagccatatgaattgtctactcagaatgtagtatgtgcccagtaaatgtttgtcaaatgaataaacaaaggaacaaacaaaggaatactttttgtttaataaccaagagcagaagttctcaagaactacatctaacctgagagatatacaacctctctaccacatcccaaagcctcaatggcataatgattctttctatttaacactgtagaaaaaaatatttcttcaaaaggctcagttgatcacttaaagcaaatttatatctatagaaatttcagccttctacacgaggggaaaaaaaacactttttaatgtagcaatttagtttctcctttaggttaagtgcggtacagctttaaaaatgagaaccaaaacaaactagtagcactgcaaatttcttaacatacaaatttagtgctgaacaatactttaaaaaactacagctagagagtgaacaggaatgtttgcattttattcctcatctgacattcagtgatgaatgtaaaatatgccctcagggaaaatggtttatacatattactcataaagatgtatttttttttaagtcgaagtctgtattgtatgaataaaaagatccaacttgttactttggcaccagagagtctcttttcaaaatgatttaatagaaaagtttctattctctttatatggacagaaacttctctgtccatataaagagtttagaaactcttctacccataaaaatgaatttcagagagttctaaagcaatgctgctactacttaaataacaacagagtcaaaatcaaatttatcttagtggaagaatggcattcctcctagttaccataaactattggtctgaaagaatgtggggaaaaaaactagatgaacaacgttctcactcttacccttaaacaaatgctgcagtttacatcaaaagaatattagtttttactcagtgaaagagtaaagttttgagtaaatcacccattccaattatctagtacaggaagaaaactggccattaaatataagggggaagaaatgaccactaaaatgtatggtttgaaaaactttagacatatatttttcttttttagagatagggtcttgctattggccaagctggagtgcagtggtgtgatcacagctcactgcagcctcaaacttctgggctcaagcgatcctcccatctcagcctcctaagtagctgggactcacaacaccacacctggctgatattttttgttttgtttttttaaacactgggtctctctatgttacccaggctggtcttgaacatctggcctcaagtgatcctcctatctcagcctcccaaattgctgggattataggcttctgcactgggcctagacttctaccatatgtttctttctttctttttgatttttagtagagatgaggtttcaccatgttgcccaacctgatgtcaaactcctgagctcaggcaatccacccaccttggcctcccaaagtgctgggattacaggtgtgagtcaccgcacctggcccttatcctatgtttcttttatgaaactctgcaaccagtctttacattacattttcacacatgccaagctaaactctgtgattatgaaaatattttctgtgcctttgctaatacatgtctccttggtccagaatattatattcctcactcccacatctaccagtagaaatctatccacctttctttaatacccactgaaatatcaaccacctcctctaggaaactcctctgcttcattcaatcacatgtgatctcttcctactcttaattccattatcattcttcttaatctctctaatgattacaaattttgtcaaataatgcaaggatgtgtacacttattttataccacaacccaaactgaaatcttcttgaagagacagtaacttgtttatttttgaatctttaacaggacttagtgcagtcctccgcacaaagtatgtactcaataatgatttcttcaatggattaagtaaataaaaataaatgtgaagtaaagttatgagatttctcaggaagatcttaaatataatataagcaaggctctcaatataaatattttggtattttaaagaaattcaactaaagatatttaaagttctttctcaatacaaaataagtattagtatatggaattaggctgtattgctctacgggaaatcacaggaattttagtttgcagttctaaaatacctctaacttcaaaggcagtaagaaagacttggaacaataagagttagtctccatccattcgtgtgtttattcatcaagcatttatggaaagattattatgtgcagttgtgatgcctttgctacctaaatttcataaatatcatttcacttctattaatattttcatatgccatagtcacaaatctttattctaatggttcttcctaacctttttcttaccctgataaattaacccctgtgataaaaagtttatgatagcccctaagattcctactccctatatacaacctgcataaacttctccccgttgtgagataaaaataagactttacttccatgattagattatattatgtagtaaagatgaggggattttatgaacgtaattaaggtctacctcaattgattctgagttaatcaaaagggagattatcttgggtggacctgacttaatcaggtaaaagtccttaaaagatacaatgcacccctacagaagagacacctttgttggctttgaagaaggaaaaaaaaaagtagtagtagtaataagctgccacgttgttgagagggcgatatgactaggacctgaatgcaacctttaagacctaagagtcatccttagccaacagcccgcaaaagactgggtatctcactcagtcctacgactacaagggataaattctgcaaacaaactgagggaccctggaagctaatctttccccagtcaagcctttagtgagaccacaaccccagttgactctgctgggagccttgtaatacactgagaagaaaaacccagataagccatgcccagactcctgacccacagaaagagtaagatgataaatgtgtactgttttacggtgctaattttgtggtaatttgttatgcagcaacatagaactaatacaacccatctaattatatttcaatcctggttcctcatgtccccctgaaatgaattctaatgtaggctttctgtcttctgcatggtcagtatcaaacccctctgaaatgaaaactagatggcataatattaatacatttaataactgtagtcactgtactatgtgagaattgacaacggtactgacaaaagattataataatgtgctagtttgctcttatgactagattctgaaactcagtagcaaatttatttttgccaattttattggacttctgatttcagctccaatatgtaaagaactggaagtcatcacacctgttttacaacagaaaaaagttaaacaaactaaaaatcaattacttttctgggatccatctgagaactgaggtcacaaggcaaactgccaccctgaaatctggagagacaggtaaatacagagaatcaagatatgcttactgggacagcggccactaaaacataaattgacagaaatagttaaaagataatattgatgaattgctggagataaaatgtgaactagtttataagtgagaaactcctaggggctgcagtcttgccagggggcccacaatttttaagacattacctctaaaaatcccaccaggttcccacagtaaagagccaagaaaaaccctactgtttcgggcaggaggagggaaaaaaacaaccattttgaaatacgttcaacgcattctctaaaacaatggccagtctgccagtaaggaagattttaccagatccttatccaacatgagggaagggatcatttcctaaactgcagctccctgccatctaatcttatgatatgaatgaagagctcagaaacacttgtgaaggtcacaggcaagggacacagtcatgctaaaagactgagacataatcataggattagaagatgcttcctgttccccataccttaccaccacatcaacagggctccagtataacagcagaggattacaacagagagagacagctgcaaggctcagattctatttaagaataagtttttagggacattggagagtaactcaagtccacattaagaattaattaaagagcactggtcaagataactacaaggtagttataaaagacagtataaaatgtgttttaacatagatacaaaagacaatataaaatgtattctgtttttaattttttttatctgatttgaaagtcagttgcaaaaggtaataattgtaaatctgtgttgagagacatacaatgtgtaaagatgtaatttttataataatgacacaaagaaggtaggattaaaaaaacagctacataggattaaagcttctgcattctattgaaaattaaattagtattaatccaaactacataagatgttaaatataattcctaggacaaccactaagaaaataactaaaaaatacacagtaaaagaaaagccaagggaattaaagtgacacattagaaaaatttaaatggcacactagaaaatatctatctattagattcaaaaggcaatgatagagaaatagagggggaaaaggcaccagatatacagaaaacaaacagcaaagtggcatttgtaaacactaccttagcactaattacattaaacgtaaatggagtaaacactcaagttaaaaggcagagataagcagaatgaatttttcaaatgctccaactatatgctgtctataagagacacactttaaatttagacacaaataggttgaaagtaaaaggaatgttattcagccataaaaaggaataaagtattaattcatcctataatgctgaacatggaaacattacactatgtgaaaaagccagacacaaaaagtcacatattgtatgattcaatttagatgaaatgttcagaaaaggcaaatctatagaaatagcagattagtggatactagggaatagcaggtaagagtaggcagtgactgttaatgagttaggagtttctttttggggtcagaaaaatattctggaattagacagtggtgatgattacacaactttgtgaatatactaaaaatgactcaatgcaaaaatgcgcaaagaatttgaataggcatttctctaaagaagatgtctgaattactaataagcacatgaaaatatacttaacatcactagtcatcagggaactgcaaatcaaaaccacaaggagatactacactttatacccatttgaaaggctattatcaaaaaaaacataaaataacaagtattggcaaaaatgtggaaaaattggaatccttgtgcactgctgatgggaatctaaattatgcattgactataaaaaaaacagtttggtggttcttcaaaaagttaaatttaggctgggcgtggtggttcacgcctgtgatcccagcactttgggaggccgaggcaggcagatcacctgaggtcaggagttcaagaccagcctggccaacatggtgaaaccctgtctctactaaaaatacacaaaaattagccagacatgttggcggacacctgtaatcccagctactcgggaggctaaggcaggagaatcactggaacctggaaagcggaggttgcaatgagctgagatgatgccactgcactccagcctgggtgacagagtgagactccatctcaaaaaaagaagttacatttagaattatcacaagatccagaaattacatttctaggtatatatccgaatgaattgaaagcaaggtcacaaatagatatttgtacaccagcgttcatagcagcattattcacaacaggcaaaaggtagaaacaatccaaatacccatcgacagatgaatggataagcaaatgtgagattatatatatatatatatatatatatatatatatatatatatatatatatataaaatgaaatattattctgccataaaaaggattccgatgtatgctacaagatggacgaaccctgaaaacattatggctaatgaaataaatcagaaacaaaggacaaatactgtatgattccacttatatgaagtagctacaatagccaaattcacagagacagaaagaatactagagggtaacaggaaatggggaaaaggaatctggggagttattttgtgggaacagagttcttatttggtatgatgaaaggttctgaaaatagatagtggtcttggttgtctaacattgtgaatgtacttaattgtacacacacaaaaaatgctaaggccgaacgcagtggctcacgcctgtaatcccagcactttgggaggccaaggcgggcagatcatctgaggtcgggagttcaagaccagcctgaccaacctggagaaaccccatctctactaaaaatacaaaattagccgggtgtggtggcacatgactgcaatcccagctactcaggaggctgaggcaggagaatcacttgaacccgggaggcagaggttgcagtgagccaagatcacaccattgcactccagactgggcaacaagggtaaaattccatctcagaaaaaaaaaaaaaaaaaaaaaaacctaaattttgttatgcatgtttcaccacaattagaaatgacaataaatatcagaaaaataaatcaaagacctgcgaagcctctggggatgtgggactgggaagaaaggaggagtagtatagtgaagggagctgttgttttttcattataaccattctaacattatttaattatgtataagaattattttgataaattaagatatttaaagctaaaaaagaaattaaagaatttaatgacaaacaacaaggttttaatgatatgtattataaaggattactatccacactatatatttaaaagcccatacaaatcaattaaaaagacaaatacaaccaagacaagcagacaataaacaaaaattttaaaagaattaaacaaaaacctgcagaacaactaattgacaaacctgacaaaaacaaaacctgacaaaacctgacaaacttgataaaaacaagcaatggggaaagaattccctatttaataagtggtgctgggaaaactggctagccatatgtagaaagctgaaactggatcccttccttacaccttatacaaaaattaattcaagatggattaaagacttaaatcttagacctaaaaccataaaaaccctagaagaaaacctaggcaataccattcagaacataggcatgggcaaggacttcatgactaaaacgccaaaatcaatgacaacaaaagccaaaattgaaaaatgggatctaattaaactaaagagcttcagtacagcaaaagaaactaccatcagagtgaacagcctacagaacattctgtaggctcccatccctacagaatgggagaaaatttttgcgatctacccatctgacaaagggctaatatctagaatctacaaagaacttaaacaaatttacaagaaaaaaacaaacaaccccatcaaaaagtgggcaaaggatatgaacagacacttctcaaaagaagacatttatgcagccaacagacacatgaaaaaatgctcatcatcactggtcatcagagaaatgcaaatcaaaaccacaatgagataccatctcacaccagttagaatggtgatcattaaacagtcaggaaacaacagaagctggagaggatgtagagaaacaggaacgcttttacactgttggtgggagtataaattagttcaaccattgtggaagacagtgtggcgattcctcaaggatctaaaactagaaataccatttgacccagtcatcacattactgggtatatacccaaaggattataaatcatgctactataaagacacatgcatacgtatatttattgcagcctattcacaatagcaaagacttggaaccaacccaaatgtccatcaatgatagactggattaagaaaatgtggcacatatacaccatagaatactatgcagccataaaaaaggatgagttcatgtcctttgcagggacatggatgaagctggaaaccatcattctcagcaaactatcacaaagacagaaaaccaaacaccgcatgttctcactcataggtgggaattgaacaatgagaacatgtggacgcagggtagggaacatcacacactggggcctgttctggggtgggggcctaggggagggatagcattaggagaaatacctaatgtaaatgacgagttgatgggtgcagcaaaccagcatggcacatgtatacgtatgtaacaaacctgcacgttgtgcacatgtaccctagaacttaaagtataataataaaaaaagaaactatgagataataaatgtttactgttttaagccacaaaaaaattaaacaaaaacctgcagaacaattaatttcgcaatcaaagaaataaactcaattggaacaaagtatattcgaaggatttcctgtgtctttatttttaattgaaaagctagaagcagaaaaataatctattcattttgctaatatatatacagtcactaaaaagttatttcaatgttatagtctctagtcacccaattataaatgtctgtaactaaaattcatactgtctgctatatgcattccaagcctagcagaaaaatgtcacccagacatctcctatctccctttttgtgactatgactggaaaatataaaaaggttttagcaatgaaataagattttgctttaatcgcttacataactgtggagtgagtacagtttccataatcccataaataacttttcttccaatttcccggaagatatttgtctccatatttaagaattaaaagtcctaaaaattttattaggtaagaccaactccctacaagttttattgtatgacttagtatcaagcttaattactagttttcctaaatataactgtttggtgtagatgttcacactggaataaatcttgttttccattaagaattttaaaaaatgtttatgtccgttttatttttagatattcttgtaaaaaattatctgattaaatatgtttttgaaaacaaatcctttaatttatctacaagagactaattgctttagtgtatccctagctatcaaagtacatatatataaaaagacagtagaagagtcaaaagtatcaatattgtcattcaaatatattacttccaaatgcttctgtccttagaggtataacttcctgtggaaaaaagagaagggaacgccacttctctacattggatttaggttagattttgatgcaatgtgatgttactttcaggaattataagtggtttcaatgctttgaatgttaggaggaccaaaatatactaaataatttcaaattaactaaaaaaaattattaaaaatcagtgactctaaaaacaacaacaaaattcttctggccagatacatgaagtaaaatgagggcaacgaagaaagtttggcttagattaactttaatgaaaccttcagaaatgtaatttatgaaaataaaaaagaatgctctgtttctttctactctgaaaatatcgacttgtccctaagaataaaaatgtacacataaacacttctcctatataattaacattgcttgaagacttttattctttcagattattttattttattttagagagagtcttattctgttgcccacgctggagtgcaggggtgcaatcatagctcactgtaacctcaacctcctgggctcaagcaatcctcccacctcagcctcgcaggtagctgggactataggtgtgtgccaccacacccagctaatttttgtattttgtagaggcagagtttcaccatgttctccaggctggtctcgaactcctgggctcaagtgatcctcccagctcagcctcccaacctgctgggattacaagcatgagccaccacgtccagccttgctctttcagacttttaagtaaaacagaggtaggacaatcaggcagtatcttaatcaaaaaataagtaaaataatatgtgatgtttagaaaactatagttattaccttgttgcctctaccctaggaagcttactgtggtaattttaaaattagcatgccaatgtttaaaatgtaaatgattatttaaaggcaaaagaaacaataaatattcccttaccttgtaagatggcaagaaacacaaaattccttggctcacagtctggcacacagataacaaaagtgctcccacttcatcttggaactcaaatgtttcagtattctggaaggtagcacagagattccgacccttggggcctgacccaatggtaccaacccaaacctagaatatgaatatgtcattattagagttatgcctgaaaaaggcatggaaattagtatttatttggaagtatgtacataaaagatcaagcaacaagtttaacaatttatttttaaattgtcagggggttttctattaccttcaattaactgtatacagatttaatttataaatgttttgctttaggcagatcactaaattctcttagagtgaaaattctttgaaagcaaaacaggttgtacctgtctctgtttacttaatagctttgcaaaatttaagcatgtaacaaatttttgttaggtgaataaatgaacaagtgaaatgatgaatatataccaatagcagaatcagataattccaaaatactggggatgaaggccagtataatttgccataggcaagtctcaaaaatgacaggaactactctttcaaaaattcattggtgctcaaagatccttagtcatagaaaaaaatcacacccaccacatcttacagttatttgcaattctatctcccttatatgtagagagagggagagagacgaaaattttgcaaaatgttaacaagtgatgaatctaggtgaaggatataaagatattcacaatattaatattatctttccaacttttctgaaatttctaattttttgaaatacagttgaaagaatcaatgaatgaatgatcaaaatgtagcattgagtagaaaaaaacaaactttttcctttgctctcacaccacagcaatcaacacagaaaacttctgtgaccaaatgtgtgggaggttttttccacataccaagcaatcaattctgcaacagacatcaactgggtgtcctctaattcaattcaattctgatactatctactgggagatgataacttcagatcccagaggttgagggctcagtccccaagactgcccctgatttctgtggccagtcacagttgtttttacttgcacttctgactgatcagctagaaatcgggcatcccacaaccctctgcttgggttcaattaatttggtagagctgctcacagaacccagggacacatttacctacacttactgatttattagaaaaaatattacaaaggatacagataaagagatgtatgtgggaaggggctcagagcttcaattcccaggcacatcaccctccaagtgttcaggaacctccaagtgttcagctatctggaagctctctgaaccctgtccttctaggtttttatggaggcttcattatgtaggcatgattgattaaaccactggccattaagataaacttaacctttagcatcatctcccccaagccctccccagaggttgaggaatgggggtgaaaatcccaactctcctatcatgtcttggtcttcccggaggccagccctgatcctgatgctacctaggagccccctaccattagtcatctcattagcatacaaaatgtcactttggagattctaaggattttaggagttgtatgccaggaaatggagtggaagaccaaatatatatattataaatcacaggcatatacacacaagaaacattattcacctttaaagaggaaactctggcacatgctacaacatagatgatgaactttgaagacattatctgcaacatggacaaaccttgaggacattactaagtaaaataagccagtcacaaaaacgacaaatattttatgattccacttatatgaagtatttatagtaatcagattcatagaaacagaaagcagaatggtagttaccaggagctgaggagagggggagaatagagagctgttgtttaatgggaacagagtttcagtttttcaagaggagaaagtcttgagattggttgcacaacaacatatacatacttaataagactgagctgtatactcaaaaatggttaagatggtaaattttatatatattctaccacaattaaaagttttttaaattttaagttgaaggaaaatattacagtgtaacagaatccagctgcacaactacattattataattcagcgacattataggttaaatggacttttgtgcagtaggctgagaacatagagcctgtaataacattcttatgagaaaacgtatgctgaatttaccaacttcccatatttatctgtgtctctaaagaaagcaacttgaaaacgtggaacatgtattcttccttcactgctgttcatagtcacatttctcagcaggaacactctggcatttggaaagcacaattcttagttacataggagtagcattctaggttcccaactaccaaatgccgtagttgctcccaagtaattgtgaggaccaaaaatgttcccacctataaacctgtgtatatagcttaataaagagctagcattgtgttaggcacacaggtgatgttaacttaaccactttagcattaaccacagcttaacatcacctgtgtgcctaaccactttaaaatatttcataaaaagaaaccagaaggcataatgaaaaataacaatctatacatttccacaaaaattaaaataacatttagtagccatcgttataaaacattaaaatcttaaatcataggactcataagagtacttttaactcatttcagatattcaaacatgctgaacacttgctaaataccagctattaatctaggcacagaggaagaacgtggatgtaaaaggaagaatcaggatacactgtagtctaatggaaaagagaagcataaataattatacaagctgggcatggtagtacatgcctgtagtcccagctactcaggaggctgaggcaggtggactgcctgagcctgggagtttgaagccagcctgggcaacatagcaagcgaccttgtctctaaaaagataaagtctggccaaaatggcaaaaccccgtctctactaaaaatacaaaaatgtgccaggcatggtggcatacacccataatcccagctactcagaaggttgaggcaggagaaccgctggaacccaggaggcgaaggctgcagtgagccaagatcgcaccactgcactccagtctgggtgacagagcaaaaccttgtctcaaaaaataaaagtaaaaataaaaatacagagataaaataaataaaatataaataggctgggcacagtggctcacgcctgtaatcccaacactttgggaggctgaggcaagtgcatcatttgagggcaggagttcaagaccagaatggacaacatgctgaaaccccatctctaccaaaaaaataaaaaattagccaggcgtgcggcgcacacctgtaatctcagcaacttgagaggctgaagcaggagaattgcttaaacacgagtgagccaagatcacaccactgcactccagcctgggcaacagagccagactctgtctcaaaaatcaatcaatcaataaataaaacataattatacaatgagaattaaagaaatcaaaattttgttttcattacaaaactaaaacttacttagaagaagaagctgaaatacagccttttgcatcccaagtgactggattatttccttctgttgacacatcattaagtagctgacagattttcttttattgtaaaactggaatgttgaatttcctaccaagatttacttgctggcacttcaggtatcttctaacttgtttacatagttatattgaagtagaaacactgaaggccttccaaaaaaaaaaacaacaactaacctgtgaatttttaatgatatgattagcctccagctggatagtaaatgtaacaccaagttctgacgaaaaggatttcattggtgataatgtaccagatgtcaaaacaatggtctgaactttgccattaatatctgaaaaggcctaaaagaaaacaacattagataaataaaattatctttagaagaggctgggcaaagtggctcacacctgtaatcccagcactttgggaggctgaagcaggaagatcgcttgagtctaggagtctgagaccagcctgggcaatatggtgaaaccccgtctctacaaaaaatacaaaaattagccgggcatggtgacacatgcctatagtcccagctactcgggaagctaaggtgggaggatcgcttgagcctggaaggtcaaggctacagtgagctgagattgcaccactgcactccagcctgggtgaagagcaagaccctgcctcaaaacaacaacaacaacaacaacaaacaactatctttaaaagagtcaaccacatttattaaaatgctggtactgagcaagaagacaaaatttccatttacatgatgagcttaccacagctggatttaagcaccaaaagtttagcacatgaactgcagttttctgtcgtgaacgtttcttattttttggtagaaccaacaacccatttttgtctgaaatatcaatctgatttgtccaggagtaagtctgttgaatcgcaattttataatcatctgcaaatctagatgcaaagaaagtgctaattaagtggcaaaacttttaaaacctatgacccagctacatacaatataaaaactgattacattaaaactcatttgaaagagctggtaccttcccattcaaaaataacattctccttaccattaattaaattcagtaattctgatattaataaagccattaatcatagaatcaactgattctcagagggaatattagaaatcatctaaccatctatcttttatcagctacttcctaacctcattttcaaacattacatatgtcatggcagaagcagaattaaaatccaggcctcctaactcccagtccagagctctctgcatgctctactacatgatgagttacaaaatagaaaacagtattatggttaaagagactaaaaggtgggttatacttttttattaaatgagaaaatagaaggataatttttactgaaagtttttaaagtattagcaacaagttataaaattcttacattcctttgaaacctgagtctcagccttcatctacttttaatgaaggtgctgaaccagatgatatctgtgatcccatccagtgtataactgctttcaataagaatctagaaaatggttaagcttaaaaataataaaatgtggccaggcgcggtggttcacacctgtaatcccagcactttgggaggccgaggcaggtggatcacgaggtcaggagttcgagaccagcctggccaacatggtgaaaccccgtctctactaaaaatacaaaaattagccaggtgtggtggcagtcgcctgtaaccccagctactcaggaggctgaggcaggagaatcacttgaacccgggaggtggaggttgcagtgagctgagatagcgccactgcactgtagcctgggtgacggagcaagactccatctcaaaaaaaaaaaaaaaagtaaaatgtgatattctctaccatgtcttcgctatagtatttccttattcatttcactcctagagagattagatctcaaaattaaagttgggaacttaacaactgtggagagaatcttataaaaatactgggagccaaaaactgtaaaactcttaaaacaaaggggagaccgggtgcgatggctcacgcctgtaatcccagcactttgggaggccgaggtgggcggatcacgaggtcaggagatcgagaccattctggctaacacggtgaaaccccgtctctactagaaaatacaaaaaattagccgggcttagtggcgggcgcctgtagtcccagctactcgggaggctgaggcaggagaatggcatgaacccgggaggctgagcttgcagtgagccgagatcgcgccactgcactccaacctgggtgacagagcgagactcccgtctcagaaaaaaaaaaaaaaaaaggaaaagaaaacataggggaaatcttcatatcagatttggccatgatttactggatgtgacactaaaagtacaggcaacaacaagaaaagagaaagataaattggacttcaacaagattaaaaaccttttctgcatcaaaggacactatgaataaatgaaaaaacaacccacagaatgagagaaaatatttgtaaagtatatatctcttacaggactgacatccagaatatctaaataactacagctcaacaacaacaacaaaaaaacccaataattcaaaagtgggcaaaagacttcaatagatatttctccaaaaaaagacatacaattggccaataagcacatgaaaagattctcaacttctctagtcattaggaaatacaaataaaaaccagatgatatcacttgatacctattaggatggctattatacaaaaaataaaataacgagtgtcagcaaaaacaattctgatatatgctgctacataaactgttggcaaggatgtgtagaaattggaacccttgtgcattgataatgagaatggaaaataatgcagttgctgtgagaaacagtatggtgagtcctcaaaaagttaaatgcagcattaccatatgattctgcaattccactgctaggtacttatatacacccagaagaactgaaagcagaactcagatatttgtacaccaacgttcatagtagcattgtttacaataggcaaaagatgaaaacaacccaaatgtccattaacataagaataaattaacaaattgtggtatatacatacaatggagtattattcagccatagaaaggaatgaaattctgatatatgctactacataaatgaactctgaaaacactgtgccaaatgaattgaaataagccagacacaaaaagacaaacattgtatgatcgctcttatgtgaaatacctagaaaggacttcataagatgaaaatagaatacaggttagcaggtgatgaggggaaagactctaggggttattatttcatgggtacagaattcctatttggaataataaaaaatttctggaaatctctggaaatgagtacaatgtacaacattgcaaatatactgtacttaatggcactgagttgtatacgtaaaatggttaaaatggtgtattttatgtatattttaccacaataaaaaaaaaataccagaactaggtactactataatttaagttacaggatgagagggattggttgtttttcattttccacagttcatacaataaaaaagggactttctgacactgtaggaacataagaaaactttagcaatagaagataatttaatatgaattaattaaatatatttatttaatgatttcaatattcattaatataaaagactaattttggccaggcatgggctcacacttacaatcctagcactttgggaggctgaggtgggaggatcacttgaggccaggagttcaagaccatcctgatcaacatagtgagatctcatctctacaaaaaaaataaaaattaaaaaattagctgggtgtgggtgttgcacacctgtaatcccagctactcaggaaacaggtgggaggattgcttaagcccaggaggtcaaagttgcagtgagctgtgatcatgcaactgcacttcagcctgggtgacagagaagtccctgtctcaaaaaagcatcagactaatttcaattcctctaagtctgtgtcaataagagcaaatatataataatatctataacacttgttttcaattctcctatttactcacccaaaataggtatgtattaaacacatgctagcatccaaattaggctatttttaaaaggaaaatacatactagttatcttcacttacctgctattttgcctaaaaagatagtcaagtaccataaaaagtcctttaagcattatttgagttgatgcactaataacaggtacttctcttgcctcctctttaccataaattggtgagattttttcctctttttgaagaacagcagaaaaatgtccctataagaaattaccatattaagtatagaggggttgggagggaattggaaaaagaaacttctcaaaaatacaatgaaacccaacaaaacatgcattgaaattttaggtgaacagaattgctatagtttgatagtctgacttctccaaatctgatattgaaatttcatccccagtaatggaagtggggcatatcaggaggtttgggaccatgggggtagatacctcatgaatagattaacgccctccctaagtagagagggggtgagttagtgctctgttagttcccacgagagctggttgttagaaagagcctgacacctccctcccttctctctctcgcttcttctcttgccatatgatctgtacaaaccagctccccttcaccttttgccatcagtggaagcaggctaaggtcctcaaaattagatgctggagccatgcttcgtacaagctgcagaactgtgaaccaaataaacctcctttctttgtaagttacccagcctcaggtatttatagtgatacaaacaaagacaattattaacagcacaatgctaacaatatattttagattgccatattagcaaaattctcctcagagtcaaagactctttaataataagttaggtatttagaagattcaatcagggtattatttggtgcctttcagatgtaaggaattaaataaaaatgtagcaaatggcttctccaaaaggctttaaagagttgatatgttgccttaaatccatgagttatttccagaaagtaattctgatgctgagaataatatgactacatcacaagcaaaactaaatgacttaaggaaacaatacatgctaaataacaaaatgtatgttaactggttctttggtctttacatggctcataagttttaatatggatgaaagtgtggacattaaaacaaaattataagaaaacagaagagtatgttccccacattgtaaaagagaaaattctgaatactgaagcaataaaagatattggtgacaactctgatgtctgacaataaaatgtgttcaatgaaaataaaatggggaaataggataaataagaaagatacattttaatattcagatatatcatgaaacaatacaaatctataagagtaaaaatcagccttcactgaacaaaacattacagaatacaaataagtagaaagacttaaaaaacaaaccaacaaagaacaaacaagaaagacaacatgaacttggaaaaatattcagccctgcaatgaaatacaaatatcaaattattctttttgaaaaatgaagtcccctcagcaacaccttatatcaaagcttaatatccttctccaacactggcagaacactggcaatttactctgataaaatatagaaaatataaactactaaaggtgaggcgctgtactaaaaacagaagggctaaatgaaatcctacatattcaattattagagtactccgagctcaattccagttagcttacctacacattggcagctgggttggggggggtagaaaaatagaaaactaagcaatggaaaaataaataaaaagttaattatggttccttaggaaacatacataaagctgtataaaaatataatcaagtaagctacatgcattactatcatgggctataataatacatacacgtgatgatatccacgctgaatatcaatataactatactggcagaatagagagtgaagagagagaagaaagaagggcagaaaagcaggaagcaaaggaagaagagagagcgcatgagtgagcgtgtgtgtgtgtgtgtgacagagagagaagagtgtgtgtgagtgtgtgcgtgtctaaaggagctaaatcatcattatacttaacagaaagtcaacagacaacatctaaaattgaaaactccaaagaagcagaacccacgttatttttttaaatgtggttaaatatcagaagaaaccactacaagagataaaagtgcactccaaagtgagaattgggattgaggagtgggtcagaggaatgcttttctcaacagaactgactctttatattctataggtatactactttggtaaaaattcctaaaaatattgataatcataatgatgaatgtcttagccaactagaattagggcaaatttccttaatccaataaaaataactataaaatatataatataataaaaatataatatatatattatttaacagctctaattaattttttaatttaattaactgaattgaattgaattaaaattaacagctttattgagctataattcacatgcttacaatttacctttttaaagtgagttctgtgggttatttctatattatatattttatatattatatatttatatataatatagtatatattatatatttatatattttatataaatatattttatataatatatttatataaaatatatattcatatatgtattaatatattaatatataaatatattttatatataatgtaaatataaaaatatatatttatatataatatatttatatataatatatttatattatatttatatttataaatttatataaatttataaataattttataaaattataattttatttataaataaatttatataaatttatataaatttataaatataattatatataaatatattgcatgtttatgtattaataaatatattaatatataatatattatatactatataaaatatataaaaatatattatatactatataaaatatataaaaatatattatatactatataaaatatataaaaatatattatatactatataaaatatataaaaatatattatatactatataaaatatataaaaatatattatatactatataaaatatataaaaatatattatatactatataaaatatataaaaatatataaaacattatatattaatatattatatatagttatatactatatatagtatatatatttatataaaatatttatataaaatatataatatatatactatatattatatataaatatataatataaaaataacccacagaactcactttaaaaaggtaaattttaagcatgtgaattatacctcaatagagctgttaattaaaaaagaatttttaatcacagcaaacatctcaataaagggtgcaatactagtaattcctcctttaagcaacaaaaccaagatgtctttttcttttttttattttattttatttcttttttgagacagagtctcgctctgtcgcccaggctggactgcagtggcgcgatttcggctcactgcaagctccgcctcccaggtttgcgccattctcctgcctcagcctcctgagtagcggggactacaggcgcccgccaccacgcccggctaattttttgtatttttagtagagacggggtttcaccgtgttagccaggatggtctcaatctcctgacctcgtgatctgcccgcctcggcctcccaaagtgctgggattacaggcgtgagccactgcgcctggcccaggatgtctttttcattgcctgtgataaacaacgcactggaagtctgagacagcatagtaagaaataaaaacatgaagaaatagaaagaaatgagaaagaaagaaaccggtcattattcagacaatatggttatctacatggaaaatttaagataatctgtgggcaaacctgtaaaataattcaacaaggtggttaataagacaattataagataaatatataaaaatcaaacaccagttttatatagcaataacaattaaaaatgtaattttaaaaatatatcatttgtaatggaaacagaaactttaagctacccatgaataaatctaaccaaagccatctaatcttttaaaaataaaattataaaattttattgaaagataggaaaaaataatgaagaactatatcttgtcatgaatgggaaaacttcataatgtaaatgcatgaattctttccaaattaatctataaatacagtgcaattacaataaaaattctaacagaacttttcctagagattataagctaattctaaaattcaaatggcagagtaaaacaaaggacagctgatacaattccaaaggaaaataataaagtgagggatatgccctactatatataagcacttttcttaaatcattaattaacaaatgtgacaaattagagaaacagaatggtggaacacaatcaagtccagatataaattcacacatatatgaaaattagagggactgggtgtagtggttcactcttgtaatcccagtgcttcaggaggccgaggtgggaggatcgcctgaggccaggagttcaagaccagcctaggcaacatagtgagaccctgtctctacaaaacataaaaaaaattaagccaggcacgggtggctcatgcttgtaatcctagcactttgaaagaccgaggcgggtggatcacttgagctcaggagctggagaccagcctgggcaacatgacaaaagcccgtctctacaaaaaaatacaaaaaatgagccaggtgtggtggcatgcttgtggtcccaggtacttgggggcgctgaggcacaagaattgcctgaacctgggaggcggaggttgcagtgggctgagatcacaccactgcactccagcctggttaacagagtgagattctgtctcaaaataaataaaaaaataagtaattagccaggtgtggtaatgcatgcctgtagtcccagctactgagcaggctatggcaggaggatcccttaagaccagaaatccaaggttacagtgagctatgaatgcaccattgcacttcattccgggcaacacagcaagactctgtctcttaaaaacaaaaaaaaaaagttaaaaaatatttttttaattaaaaaaagaaaaataggtagcagaggtagcattacaaattagagggaaattaatatgcactatttaggaaacagtgctgggacaattctctatccatacaggaaaaaaattgattcataaattcacaacataaacaaaatgaatccaaggctttgtaaaagtatttataaatcccatcctttataaacaataaataccttaaaatttttaggagaaatataacataggataagaaaagactgcttaaagtaaattcaaaaaccacaattcataagggatgttcatatcagaactgtttattatactgggaaactggaaataacctatatttcaacttatcagattaatcaatttagaataagtacactcataaaaatgctacaccgcaattaaaaattatgtgaaggaatctttacttaaataggaaagtatacacaatatattgttaaattaaaagagggtaaaacaaatgtgtcatatcagaaatatatttataataagcaaatatgggcatagaagaaggcataagtagacataaatcacaatgttcacaatgttcatctttgagtttatgagtcatttttctttgtgccattctgtattttccagtttttttcccttgacatacattttatttgtacattttataactgacatgtaacatatacagtagaatgaactaatcttacatgtacacctcactaaatacacacacctccccatgtaactaacacctgaccaggatacaaaacattcctagaatcccagatgttcctttgtgccccttctcagcccaaactgcttcaaacccccacatagttgtaaccagtacttcaacttctgtcaccataattaggtttgtctgttcttcaacttcataaaaatagatttatacagtttatacccttttgaatctggtttccttcacctaacataatatttaagattcatctagagccaggtgcggtggctcacacctgtaatcctagcactttgggaggccatggtgggcggatcacctgaggtcaggagttcgaggccagcctgaccaacatggagaaactccgtctctactaaaaatacaaaaaattagccaggtgtggtggcgcatgcctgtaatcccagctacttgggagtctgaggcaggagaatcacttgaacccaggaggcagaggttgcggtgagctgagatcacgccattgcactccagtctgggcaacaagggcgaaactccatctcaaaaaaatatatatatatatctatatggttgtgttggaagcagttcattttttattgctatgtagtattccactatatgaatatgctacaatttatccttttctttttttttaaacagggtcttgctctgtgccccaggctggagtgtagtggtgcaatcatggttcactgtagcctcaacctcctgggttcaggtgatcctcctgcctcagcctcccaagtagctgggactacagcgcatgccaccacaccagctaattttttgtagacaacagggtctttgttgcccaggctggtcttgaactcctgggctcaagcaatccgccagcctcagcctgtcaaagtgtaggattactggcatgcaccaccaccctcagccccattttactgttatataagtagctttcaaaatgcaaacaatttatgcaaaaaatattatgaaagatgtcacaatatggaaaaattcttacaatagataccacgctgcattttataaatgcagggcaaaaatttaagtatatcctgattaaaatatatgttttaatagtcacatgccccgaatactattgtgatcatgttggcaattattttcatcattttttttgttcaaaaacctctttgagaaataacatcagcaagatggaagaatttgagttttctagccaggcacggtgactcacacctgtgagcccagcactttgggaggccaaggcaggtggatcacttgaggtcaggagtttgacaccagcctggccaacatggtgaaaccctgtctctaccaaaaatacaaatattagccgggcatggtggggcatgcctgtagtcccagcaactcaggaggcttagacatgaggatcacttgaacacgagaggcagaggttgcagtgagccgagatcacgccactgccctccagcctgggcaacagagtgagacttcatctcaaaaaaaaaaaaaaaaaaaaaagaatttgagttttccattgtcatctcccaacaatgaaccaattctgacaaccactcgcacatgagagtacctttgttaagagtctaagagtctagcagagaagttccaggaccccattggagcaaaaaatccaagaacagatgcattgaagagggcaaaaagtatagtttcatattacctacatcacccctgccccatggaagtacagcccagtgccaagagagcctccattagcccacaattcttcccatggggaaaagtgagaatatagtgagtgattaatgaaataaagaaaatgtggcacatatatatataatgaaatattcagtcttaaaaaagaagaaaattttgccatttgcaacaacatggatgaaactggaagtattatgctatctgaaataagcctgatagaaagacaaatactgcatgctatcactcatatgtgtcatctaaaaaagttgtactcgtagaagcagagtcctcagccccaaagttcactggtgaagatgtacaacaacaggaacttttgttcattgctggtgggaatgcaaaatggtacagccactttttgtcaagagacaaagtcttgctatgttgctcaggctggagagcagtggctattcacaagcatgcaatcatagtgcactacagcctcaaattcctgggttcaagcaatcttcctgcctcagcctcccaagtagctgggactacaggcgcataccaccatacccggcagttacagccacttttgaagactgtttagcagtttcttgcaaagctaaacacagtcttaccatataatacaacaattgtgttcctaagtaaatatccaaatgagtagaaagcttgtcactaatagaaatgtttataatagctttattcacaattgccaaaaactggaaaccatcaatgtttctttcagtaggtgaatggataaactgtggtacatccaaataatgaaatatcattcagctataagaagaaatgagctatcaaggcaaaaaaatacatggaggaatcttatatgcatattgctaagacagaagccagtctgaaaagactacatactgcacaatttcaactatatggcattccagaaaaggcaaaacaatggagttagtaaaaaaaatctgtggttgccaagggtttggtgggtgtgggcgtggtgtggtggagggatgaataggtgtaacacagaagatttttaggacagtgaacacactctgtatgatactgtagtggtggattcctaggcaaaacctaattgaactctacaacacaaggggtaaaccttaaggtaacctatggactttaatgaacaataatgtagcaataatggttcatcaattataacaaatatactacactattgtaagaggtcaataatggggaaactatggagttggtgtgtattgtgtatgtgtataggtgtgtagctgggagtgagagtatatgagaattctggaccttctgcttaatttttctctaaacctaaaacaaccattctaaaatacataatctattaatttaaataagtaaatagcaacaaaaaaagaaaatatattcttatcggcaaaaaacattagaaaatataatgaaatttatgcagcctctatttagaaaaatgtacaaaaggatacgctcataaaattttgcatatagcttcataagtttcatagtcttccaaagcctactcatgatctctccatgaatatcaggtttataatttctaaattaagatgaacaaaataggaatttctcctctttttattttctaaaattttaacttttacaattgactaagtaagtctacaacctaaaaatattgactccttttagctttaaacaaagcaattaatccctttaaagactaatttccttcaaactaaataatgctatattttcacccacaatttacccatgccatcacttaaagattatcaaatttagataataaaatttttaaaaaattaaattgctatatttaacaattctgggttactcactagatttaatctggatttagtcacgactaaatcacttctaattcactaaatacgtttcacaggtagaaaaaatatcttacctgcaaaatgggaaaagtagcagtggtgatacccattttgtgtaaagttaagagcatttcatttccactccatattttacaagctgattcataatctctttctacaagatattcagcgtttgcttctaaccaactgaaataaaataaaacaattgtgtcaaccagtatcatccttacacacactatttcagcagaacaagagaatcatcattattgtcatgcgttgatctgtatatcttgacattcttaggacatgaatgtggattaattaagacaccttttaaaaagcattcatgtctcatattgcaaaataaactttatataactgaaaagaaagcttttattcagaagaaacaaacatgcatatgatttcccacttgttttgtggattcacattgctttacttagctaatgtctcttcaactgagagccaggtcttaggtacttatcccaaatatatataaaaggaaatgcaaaacaacctaataaagaaattaaagtgttacatattaacacaaaaaagagaattactagaaaatatataaatacattcattgatatatatacacattcatacattaagtgtttgaatgcctattttattccagacattgttctgggtagtgaaaataacagcagttaaataaaataggcaaggtccttactctcatggaaattacattctactaaagggagacaggaataaacatcaaaacaaatacataaacaagaaaatgtcaggtagtcatgggatactatatggccataaaaaagaacaagaacatgtcctttacgggaacatagatggagctggagatcatatccttagcaaactaatgcaggaacagaaaatactgcatgttctcacttataagtgagagctaaatgatgagaccacatggacaagaggggaacagcacatactggggcctatcggatggtgtagcgttggagacgggaaaagatcaggaaaaataactaatgagttataaggcttaatacctgggtgatgaaataatatgtacaacaaacccccataacatgtttacctgtataacaaacctgcacatgtacccctgaacttaaaagttaaaaaaaaaagttctaataaaatgaaaaaaaaatcaggtaattatatacaaataaattatgaaaataaattagtttaatataacctagttgcaactttaattttaatgtcaagaatgctctccctgaggtgacatttattctaataactgaatgcaaaaagtatccagtcatgggagaatcagaagaaaagaaatatccaagcagaaggaacagctaggagaaaggtcctgaggtggttagcaaattttgcttgtttgaggatctgaaagaaagccaatatgatttgcagcacaatgggcaaaaatgaataatggtatgaacaatgtcagagtgataagcagaaatcagtcatcttgagtcatcataagaaatctgaatttattcaaagggcaatgggaaggcttgggttttaatttttaattttcgtgggtacatagtaggtgtatatatttatggggtacatgttttgatacaggcatgcaatatgtaataatcacatcatggaagatggggtatccatcctctcaagcattaatcctttgtgttacaaataatccaattatattcttttagttatttttaaatgtacagttaaatcattattgactatagtcacactgttgtgctatcaaatactaggccttattcattcattctatttttcttttttttgtactcattaaccaacccctcctcccctgtgatccccatctactacccttgccagcctctggtaaaccatccttctactctctatctcaatggattaaattgttttcatttttagatcccacaaataagtgagaatatgtgatatttgtctttttgtgcctggcttatttcacttaacatagtgacttccaattttatccattttgttgcaaatgacaggatctccttctgtgttatggctgaatggtactccattgtgtatatgtaaccacattttctttatccattcatctgttgatggacatttaggctgctttcaaatcttgactattgtgaatagtgctgcagcaaacatgggagtatagctatacctttgatatactgatttcctttattttgggtatatatctagcagtgggattgctggatcgtttggtagctctattttaagttttttgaggaacttccaaattgttcttcatagtggttgtcctaatttacattcccaccaacagtatacgagggttgtcttttctccacatccttgccagcatttgttattgcctgtcttttgcataaaagtcattttaactggggtgaggtgatatctcattgtagttttgatcagcagagaaatgctgatcaatgatgttgagcacttttcatatgtctgattgccatttgtatgtcttctttagagaaatgtctattcaaatcttttgtccatttttaattagattattagattttttcctacagagttgtttgagctccttatatattctggttattaatcccttgtcagatgggtagtttgcaaatattttctcccattctgtgggttgcctcttcactttgttgattgtttcctttgctgtgcagcagctttttaacttgatgtgatcccatctgtccatttttgctttggttacctgtgcttgtggggtattgctcaagaagttgttccccagaccgatgtcctggagagtttttccaatgttttctggtagtagtttcatagtttgaggttgtagatttaagtctttaatctattttgatttgatttttgttaatggtgaaagataggggtcttgttttattctcctgtagatggatatccagttttcccggcaccatttattgaagagactgtctttccctcagtgcatgttcgtggcacctgtgtcaaaaatgagttcactgtaggtgtgtggatttgtttctgagttctctattctgttccattgatctgtgtgtctgtttttatgccagtactgtgctgttttggtgggaaggttttaaatacagagttttaaataaaagacagactatctattttacatgtttaaaaaatgattctagctaccaagctagaattgattactggagaaagatgagtgaaagtagagacctgttaggaggttgttataatatccttgttgagagaagactgtaggatgatagatatgaacaatcaatgatattgaggaattggggatatactgtgcaggtggcatctataagacttactcattaattggatgaggtgaggcagtaaggatattattaaggatagtatttaacttttttacttgaggaactggtacatactgtttgcttagatgaggaagactggggagaaaacagaacacaggaagaaaagcaattctgttttagatgtaaagttgaaatgtctattttgatatacaaaaagagctataaagtagatagttggatataagaatggcattctagggagaggctgaagctagagacataggttcaggcctcaccagtactgaagattatattctaagctatgatactacaaactatttagggaaaatagaactacagaagaaactaggtcccagtaccaagtaagtcctgaggcaccccaacatttagatatcaaaaagaataagaattatcaaaagaaatgataaaaaaaaatggactgtgagaaggaggaaaatcagagatgtcacagaagctaagacaaaaatgcttttcaaagaggtagtcatcaactacccaacaccactgactggctgagataaaagaaacaataacctctgtatttggcaatatagagatcactagtgatcttgatcaaaacaatttgcgtagaattgtccagagagcaacactgctaagatcgatgagggaagaatgtcaagtgagaaaatagaattagcaactacagacaactctttcaacaagttatgctgtaaaataaaaaccacaaaaatctgcatggcaaaacaccaccagaaaagacacaaatggcaaaatggggtggaaagtatttacaactcttattgcaggcaaagattttaattccctaatatatgaatggggttctataaatcattaagaaaaagaaccacaataagaacaaaaaaaggacagagatgtcaacaggcagttgacacaaaaggaaatataaatggcctttaaagatgcttaatttcatgcatattaaggaaaatgaatattaaaactacattgggataccacttttcacctagcaggctagaagaaaacaatttccatactcttatacattgctggtagaagcatacattagcccccctgtcatccacctattgtgtaaatgttagctatatctattgaaattacaaatatgtctatgctttcacccaacaattccacttctaaaaagattcctatagatatatttgcatacaaatgaaattatgtatgttcaaagttattcattatagcagtttaagagcaaaaaactagaaacaacctcctctattaatcagaggctggttaaataaactattgcatatctatctaatggaattctagatatctattttttttttaaactgagaaagctttctaggtcttaacatggaaaggtctccaaaatacactgggaattgaaaaaagcaagttgcagaaaaatgtatgtatactatgccatcatttggaaaatagtgagggacaagaaaatatatctaatattggttcataaatgagtaatatgcattgaatgataaacttgtttaggagaacacagacattaaacagatcagggatggaactggaaggaggtttttactatacaaatttgtatacattttgtcttcaaaccatgtgactgtgtaacattcaaatttttttaaagtgtaaatgtgaaggaaacagaaaaatgctacaataaatgaaatgggattcagagttgggaagtttttttctatggtaacaagattctagatcaacaacttaatgtctaataaaagaaaaattagtgtaaattgtcataaagctagtactaaatatattattttagagtactgaaatcttgattaattaaaacccatgaaactagaatcctatttaaattggagaataaagcaataaattaaagccatgatccagaattttaaaatatattaattaaaagcacgtttagtttctggttcaatatcctagacacatccttcggggctattatgttatcctgccaaattaggaataagattcacaattattcatttttaaaaatcacttatgttcattatattcttgtgaacaagacaaaaggttggactagccttgtttttaaagcttaactggcaaggaacaattcatttcccaagaagcctagttaaccaaagtttactaactttaaatactctggcataatcaaacatatttttcatataaaggcagcacaaatacactaatagacaaatcttcttacttaatgaggctacagcacacagctcgtaggggttcatgatctttcttccttatattattgttgaccatactatctagttcatcccgagcaaaccgaagctgaacttctgttacactgtaacttgctgattcccgagcacagtcctcgatgttatgagcttcatctaaaatgacaacctgttctttcagatttaaatccatctataagataaaagaattttcttgtaaaacatttggcaaaatagatttaacaacagcaggcaagatatttcattttaaaattcacactataggccaatattgcaaatgcaattacataagcaacagagattctaggtcttaaataaaacttctgaagcactatggccaaccaaatatcagctctacattattgtgtttgccatttttttactcttaaaatactttgcaaacctatcgacagcaacaaaaatatgtcagtgagtctggatcaaggtaccacaggctacacagaaaggtataaaatcccactatgaaagtgtttccaacataattttacaaactaattataagacctttaaaaataaaataacaatataagattaaaagcataagacctttaaaagtaaaataacaatacaagattaaaagcataaaacctttaaaagtaaaataacaatacaagattaaaatgactcttaaaatactaacataatatatatgttttgttttaatctgtcctgcaatccttctccaacatgggagttggagaattgttcttctccaactcccatgtgatgctggcaggactattaacctgtgaatcaaaggacatcaccactttcacaatgggggtaaggcccaggattgtcagttaaatagagtattccatccttctgtggtcacagtgactggttcaggttcaggaacagacatgtgatccacggtaggccaaccagagtaatttggagggactaatatgtggccatgctcttttctccaggtgagctagctgcttatggttatctttgttccataagcaagagtgagaacttgcctgagaataaagccatcacaataaagagaatcaagtattttttcttaagcattttttagggtaggtttgtgtcacttgcaatagaaagagtactgactaatacaaggaactgtcacaaagcaattgtcaatgagttattttgaggaagtaagaatacacagacagctgaaaagttgagaaaaaaccatggaagagtaggaaatatattggggtttaaaagataagtaggatttggatttggacagacaaagagtggacagggcattccaaagaggtgtcatcaaaagcaaagatagagtaaagaacaaggtatcctcaagggagtatgaggtaatttttgaaggattcaaattgggcagatccaggtcagactattgagcatcttgagtgtaagcttaagaaatatgaactttatctcatgagcaaaggaagcaatagatttttaggcagataaaaggatgtaataaaagcaatatttggaaaactgacctggcattgatatgcacagtgtctcagaaggaagagatctagttaagagataaccaaataagaggtaggatagaaggggtagtaaacataatgcctattaatttggatcttaaagaaatagaaagctgagatgaattgtgcagtcagatctgaagacaggaataacaattgactatgccaaattattcactttttgtcttatgctgttaacaattgcatgtctctaaaaagaaccaggcaaacaaacacaaatgccattatctgaagttcacttctcaaagctcacaaggcataattttattcccccacataagttcttcaaaacatagttttttcagagaaatgtttctaaataattctttttgaatattcataaatgcaaagagaaatcctgctgtaatcccacttcagtcactatgttccttaaaactgcttgttattttggaaattaaaatgagtgggttgattttaacccatgttaggatatgttttcagtactctaatatgtttacacaaatttatttacataaattaaagcaaaaaaaattaaaacatctaaaagcttttacattcaacatttacatctccatgagtaggaagaaggttctcatttttacacatatactcacactttcccttatttgtgcatctagaagatagttgtagggacaaaatatgatgtcagcatcttgtattagttctcgggctgtgtaatatggacaggcctttagtttcttccccaggctgacaagttcttctatatcccaggctttgcacatcccttggaaagtctgtaatgtgtgctgatcactaattttatgaactccatgataaaaatagcaggattttccctagaaacaaatatgcataactgaaatgtgaaccaatattagcatagaaggaataaaataagcttatctcagaatttgaggaacatcattaaagccacaaggctaagattttactggctacgccaccacacctggctaattttttgtcttttttgagacaataccatagctacaatcacaacgaagtctggttgactcagacttagatagaagtccaaatcggaagagctccaaataccctaaattaacttgaaaaaaatttcttttaaatatgtttgttatgcctttttttttctgattaaactgatgttaggcatgaaatacttctgaaaggattcacaaaacaatggtatcactggttgcttccaaggatgagaattaagtgactgggcacaggagtgagagatttttctctgtagacccttttgtaccttttcaactttgagccatgtgatagtatttcttattcaaatataaataagaaggaaggaaggtaagtaggtaggttggaatgtcctaaggggaaaaaaagaaagtaagagtattcactacaaaatattcaggagtaccaaaaaaagcctaaattatccataattctattacacaaagaatgcactagaaacattttggtgtatttcatttcatatttcttctatacatgtgtatataaggatatctctacaatgtgacccaatattaaaataacaagaacaagcaaggcacgatgacaggtgtgagcactttgggaggcttaggcaaaaggactgttttaggtgaggagtttgataccagcctgggcaatgtagcaaaaccctgtctctacaaaaaataaaaaattttctaggattggtggcgtacatcaatggtcctagctactcaggaagctgaggcaggaggatcacttcagcccaggagttcgaggatgcagtgagccatgatcaagccactgcactccggcctggatgacaaaacaaagccctatctctaaatagtaataaaaacaagaacaaagcaaatgttccccaggcattgaggattattaacaattcagccacaataaacaaaaatttttataaagcatattccctttgttttcttctgtctagcgtattaaaaatcatacaaggaaaatcttgacatcactaagcatcttttcgttgctgctcatatatgtacattgaattaatgtgccatagctgatgaaccagttttcttattactgggcttatagactgttaccaatttctgctttagacataaggctgcagtgagcattcttatgctggtttctaaatattttcttagtctatatttttagaaatggcattatgggatcagacgctacaaggtatttttaagtttcttgaaaacatatagtgaaattatcctccagaaagtatatattgctttgcattacccttttcccacatccttatcaacactggtgttatcttttgttatctctatcttaaaagtaaaaaatagaatcttgttttgatttgtattttttatagtttctagcaaagtttaacatagtgttgtatgaatagtctaacaaggttcaatagtaatttgtgtttcttcttttatgttatctactaatgccctttgccattctattacctttttttttttcagagatgggagtctcactctgtcacctggggtgcagtggcacgatccaatcttggttcactgcaacctccgcctcccaggttcaagcaattcttgtgcctcagccaccaagtagctggaaccacaagtgcatcaccacatatggctccttttttgtagagacagggttttgtcatgttgctcaggctggtcttgaactcctgaactcaagcgatccgcctgcctcggcctcccaaagtgctggggattacaggcatgagccactgcactccaccccattctatcactggaaataaaaaaatttcattacaggctgggcacagtggctcatgcctataatcccaacattttgagaggccaaggccggaggactgcatgagcctaggagttcaagaccagctgggcagcacagggagactcaatctctacaaaaaaacaaaaaaaattaaaccgcagtgagcagtgaccacgccactgcactccagcctgggcaacagagtgagatcctgtctcaaaaaaaaatactcattatgtgcattaataaaaaaataaaatgtttgataaaacccagccctaacaagtgtctcatatactattaaaaatgtacaaaattagaaaagtatatatatttttagtagaagtataaaattctagtagtagaagtacataggcaatttgtcaaaaaactaccaaaatttaaaattttaccattaatgtgaatagatgtaccctgtactgttaaatagccaaaaaattgaaaattaaccaaatgtctacccataagggacatgttaaataaattatggtaaattaatacaaaaactttagcccttaaaaatgatttagatttgtctatgtgttgattaggctctctatgttaagtgagaaaaacatgttgaataacgtgtatagaatgattaaattcatgtaaattgcttttttaaagaatatgtgcacatacattatagcaaatacattttttaaacattctggtagaatagatatataaaatcttacagtagttaccttaaaggattaaggagatggaggatctagaaaaagcctctcttttcattttctaaccacatacatgtactacttctctttttcaattgtcattggaactaagtggtagaataatgggccacttttattttaattaattctactatttattttaaaacgattttgaaataaaaatatttatttttcctagtttgctatccttaacaaaaaacaaccatacataaaatatataaattatatcagggataaaagactttgaggcagctatatacatatgtgtgtgtgtgtgtgtgtgtgtgtgtgtgtgtgtgtatgtgtgtgtacatacacatacatatatacatatgggttcaagcacttctcatgcctcagcctcccaagtagctgggattacaagcacgcatcaccatgcccagctaattttttgtatttttagtagagacaggttttgccatgttggccaggccagtcttgaactcctgacctcaagtgcccacctcagcctcccagagtgctggcattacaggcatgagcatcatgcccggccaatgtattttttacaaatacataataatttccccatatatatatattcaaaatatttttgtctaataattattaaaattataaaatataaaaataattagtctaacaaggttcagcaataatttgaatttcttcttttaggttatctactaatgtcctttgccattgtattactggaaataaaagatttcattacaggctgagcgcactggctcatgcttataatcctaacactttgagaagccaaggcaggatgaaatgtctctctctttctgtgtgtgtgtgtgtgtgtgtgtgtgtgtgtgtgtgtgtgtgtgtgtaaaattaaattgtatttgtatacgtctgtataataaattaaattgtatatatatacacacacatatatatgcatatatataatctttacatgtatttttatctatgaattatccaaaaggagaatccgtgttttcaaaacatacatacatcaatacatacacaaatgtatctagatattgctagaaacaaagtaaaccataagagattcataacctataaaagaatgtcagcaaatcaaaggacaagacatgaatagctgaggaccagttctcctaaagctttgtattcagccatgttaaaggatgatacctgttagtcctccaaagtattaaaaataaaaattaggaggaaaggactcatctaactatatttatttaggccattttctacattattttcactcactttctctaacctctactgttcttattcttcatactgtgtcaacttctccctacctcaatgccatctttggattttgtttctagtgtaaccaaaatagcaatggatgaggaatcagaaaatttgggttctggtccctccttgctaattacttgtctgactgagaaaactccagggcccatttttctcatgtgactaagcatcaaaagaatatttgaaccagaaggcttgtaagattccttctgactcactgactatatcatctctaaaattccttccagctctaaaattctgtgattcaggtaaaaacgtgtcaatcatctttcatactctcagtttgatacagactgagtttaataataggacattcaccatttcttcattccaagcttcttccatacaattctgaaagcttacctttatacaaaatgatcactaaagtgcctttagaatctatgactatgagctattaagtctcattttaaccaaaaaaagatatatatctaaaataatatttcagaattgtcattcctgactctagttaaaattattttttcttaactgaaacaaaaattaacttttaacagataagtgcatacttttccagtataagggcactttagtaaaagaaacaatgaacaaaaacacatgtgccttggatcaagccaaaaaatcagaaagtttacactttaagggcagttagaatgacacccctctgcaggctgacagcaaaaccagaaaagctcatccattttagcagtgtaacacaaccctgaggaagtctgtcaattgaagtgttatcacactttaaacacttccattcaaactgtcagttatctatttatcatttcgctttggtaattcagtcaaagtaaacacagacacctatggtgactttgtaattgcccttcattacaataccaaattactaacagggcttgagaacaagaaagaggatgttcatgtatgcccgtgaggtaagcattctgaggcagaattaggtcaagacaaaccacaagcagatatcttcaattattcatattactaatattaaaaaataaaatacctgttcactttaagacaaactaaaggccaatgaaaaattcggaacattgaagtctactgaattcctttttatttttacatgattcaaacttatgagtaaagatcaataaaaacgtaaccagcactgtaggattctaggttacacaaaatgaaactgtctgccttcaatacacaatcttacactttatcattgcttttaccaatgtattttaccaatgtatgtttttggttggttggttgtttttgagacaagagccttgctctgttgcccaggctgcagtgcagtggcgcgatcttggctcactgcaacctctgcctcctgggttcaagcgattctcatgcctcagcctcccaagtagctgggattacaagcatgcgccaccacgcccagctaattttttgtatttttagtagagatgtgttttgccatgttggccaggccagtctcgaactcctgacctcaagtgcccgcctctgcctcccaaagtgctgggattacaggcatgaaccatcaggcccagccaatgtattttttacaaatacataattaatttccccaataacaagtaaaacaaaaaaagataaaaatatggtgacaatgccagcaagtcttcttgcataggctatatagccaaaaaataaatttcaagcatttgaggaattcagcagatcacttagtcactatggaaagcagtctacttatgcatgaaattcatggagttttaccataaagagctttattttattatttttgaacacctgacacttaatactttcatctctccttgaagagaagttttttaatatacagagtaaaggaatttcacaattcctcagttagttagaaataactctttggaaataaatatgactgtaggatttcaacaatgactttgattcagtaattctgtattctctcctggctcggaacaagtcactcaagttttgccattggaacaccttactacttatactttataatctcgtttgaatatctgttaaagtatcttttgaccatccctaaataaagtttaaataaattttcatctataaaagagagtattaaggaagaaaagcataaaacaaaataattcacattatatggtagggggtgatatatcaatgaaatgaaactctgggggctatagctcacagttttttgtgtagaaccaactctaataagatactagtgaaaaacaaaacaactctaaaaatatattaaaatatcattggtcacttcatagtaatcaatttatggttcactgatttgggggtataatttcatacttgcaacttcaattttagagtaaactaattatcacaccagaacataggctcccaaactaatactgccaaaagaaattatttgaaagtcatataagtctttagtaagaaagaattctctatttccaccaagcccaaattcatattattctaatttccctggaaaatttcaaaaccaccaatgacatcttttgaaagttaataatttagtataacttttaaaagaggggtttgtatttatcagaattatgaggtgggataatcattatatttctcattcaattaagaaaattcaaactttgcccagacagcctaaataaactatctgcttttgaagtttttaagtatataaagtatattaattagatctaattagactaaaccatttaaacacttctatctcctcatatgatatcatccaagtttgactatttttggtagcaggatttaaaagaagaaactaagatgtctgactacaacagaaattaatttcaaggaattaaatatcccaagctttaagaccaaatcccatactttaaaacttgactaaagattttattacaggaaaattgttttttaaaagatatcaatactagcagttaatttgattttccgaagttgattatcactaaaatgtacatataaaacacatactgagtaatttaaatattttcagccttattttttctctaacacaaaataactttactcacgtttttcccatctagcaattccatgcacttctcatttctgttgaagttaccgactacctcaggatggacacaagtatgatccctgctggaaagaatagtcattggaacccctgaatatgccgtcctccggagctctctagtaatctgagcaatctgcttgtgtgtgcgtgtcccaaaatatattttgggtatcttggatttccctgtatgatccttcttaatggtattcgatgactcttgactgtttccttgtttagtagaacaacagcacctagaacagtggccagggggctgtaagaaaggaaagaaacgataactaatatctaaactaccataaaaaacgttatcaaacctcacatggaatcagaacctgtaagtaatgaatcacaatggtcaaataaagagaaataacaagaaattatagtatctaaaacttgccattaaagaaaaaactacaatttaaaattggtcctcattctttcttttaaaagttataaatgatatttccaaatttgcattctttccaacataccactctaactctccaattccaaatgttttgagtacattttaactctcctctttcataaattataaaaatgataaaacaaagtaggaacaattttaattttttcttaggcttcatacgaacttgtgatattatagtttagagttaatagttttgttcacagcatagttcattcaaatattccttaatacaccaatgcttttgaagcacttttaaatatagtttacaaaagaatagaattatcaagttgaatctaaaggatcacttaacaacttcaaaaagagaaaattcttctttagcaaaggtacgaaaataaatgcaaaatattaatatttaataatgaaagcaggttgcttgtgtggaacaagtatatctgaaattcagttacctgtcatggagtgtaaaccaatcagtaaaattatcatccagggtagtttttcctggacaatttcacttgtaactcagtttcataactgaaatagttatataaatgtctctttaaacaaaccatatggaacatcaggaatatagtctacttaatttacctgatttttctcttctgtttccaaattctcaaatactaaaaaaaaaagtttaatgctatatattagaactcacaggttcttaataactacttccttctaagtctcaattattacaccaaatgacacagaacaaagtctcattttagagaaatagtgtaaaatggttaatttatagaagtggtcattgatggggagggaaaaaaggtaaatagcattgtaacttaaaagactgtgtgctaaagagttttaatttagtagaacaaacactctacttgactgtttttttttattattgtaatcagtaagattagccttcataaacaaatgctaagtcatagcatgttacaccacaatactggggatgaagctgtcttttagcctcaactcagtggaaaagcaagttcaaattactcccagtctcactcaaccttgtccgccattaaatattacaatacatgatagaatggatgtaaatgtgacccttctggagctgtcactcactgggataaaaggttcactgatgtgccaaataaacagtcagtcaaagcagataaagttacagccatgctggaattgttacattctcctctcaggttgccagtaacagcagatttcattacagagtgctgccacattaaatagccagttccaaatatcctgccttctatattgaataattacttattcactaaaaggataaaaagaagagttatgaatggggctcttgtcaacagtgaggcaggaaacagctgacatgtggtttatgttacatatgttgcaatatccaacaatttacggtcacagagaaaatggaatgcaaattatatcatgatatttctgactgaattctttttggcttttgcaatgatcacattaatcaattaacatacaaaaagaattaaggtaactcaattagaattaatttactttttcataccatcaattttttccctcaattatactatttctcttccttatgatacagttaaattcatgtgaatactagaatgctatggcccaatgcactgttatgtactatatagatacattctatctaagcataaaagtaatccaataaagtagctttttctcaaggctgggaaaacttactttttgatgttacacttttcaacatcaattccacttaaagctttaccatctactccctttaatttcaccttttctcttggtcaaaaaaattcaaacaataatacagaaatattttttaaaaatcaactatcccatcacgaataatttagtgtataacttactgaccttcatatatacatatctttcatatctttttttcaaatagaaagggatgctattatacagttttacaactagatactttgttttcaaagtttttaatttttaaaaggggtgaatttggcacaaataatttaatgttctacttatctttaaatgttacactagtagtggtactaacaaaagcaaaagatcaagaactagtctcagaaaacttttctcactagagtgactttagttaggacttgaaatctgttttttcactccataattcagaatattataaaccacagctaactttatattaaatgtttttgtttgtttttttaagttgtaaagtaatatgaacaaattataacatctatgaacttaagtagactcctcaagaagatggttttctttttttgtttttctttttgttttgctttttttgagacagactttcactctttttgcccaggctggagtgcaatggcatgatctcggcttaccacaactccatctcccaggttccagcaagtctcctgcctcagcctcccaagtagctgcgattacaggcgtccaccaccacgcctggctaatgttgtgtttttattagagatggggtttctccatgttggtcaagctggtctcgaactcccgaaatcaggtgatccgcctgcatcggcctcccgaagtgctgggattacaggtgtaagccaccatgcccggccaagaagatggttttcaataggtacttaggcaagtaaggtataaggtggaaattaaaagttaattcttttccctttgcattattaaacaggaattatttcttcagaagcaatcttctattaaagtttccatttaaaagattcggtacaggccgggcatggtggctcacatctgtaatcccagcactctgggaggccgaggcacgtggattgctttgggtcaggagttcaagactagcctggccaacatggtgaaaccctgtctctactgaaaaaacaaaaattagccaggcatggtggcatgtgcctctagtcccagatactcgggaggctgaggcaggtgaatcacttgaaccagggagacggaggttacagtgagccaagaccacgccactgcactccagcctgggtgacagagcaagattccatctcaaaaaataaataaataataaaagatttggtacaatcatatttgaagacagaaaaactgattgtagtaatataacaaaggcttcaaaaagtcacttataacaaaagataattacctgtaccaaaatcagcaactttcaatgctctaagaaaactagaggaaggatcctgatgccagcagtgtcaggaggtcagaatatcccccaatcaaattaccaggctaatactttatggcctctctctgaaaccctttgacccaggggtcttaaaacaattagatgaataaaattaaataattttgtatctcttattgagtatttttcctgctaacaaatgatcatgtttatctttcaaaaagacttttttattttccctttgctgtttaaattgacagagatttccttttctccaggaaactagagaataaattttataatattcactctcatccaataatatatctgaaaatcaatacataagacatggggctttccaaaatctgtaaactctaagacctgtaagtggctacacagtgccagaaccaaactctttaagaaatggcttcttctccaagctagaaactgttcagagtccttttacttcaagaaaaggcaagaaaacccaacccaagtaactgcaaaaatatactatcattaaaaaaaaaaaacaggagatacatgtggatgtgacagctataatatttccatgtgcagtagccaattgtttaaaaatacatttcaaatctacaattatcaaaactgttcttagaacatcagcaaccaaggattttcagaaaatttttcttgtgtttaataaattatattccctctcttgttgtattatatagagacatgtctacattctttcaaagatgaagagttcgaagatttgatcttgaaagaaagatgaattgctgagtccttgccactgttcctttcacaagctataattataagttcaaacggtaacataccacaatgtcaacttctaaagatttataactttctccaaactttccctaccactcacacaaaaaaatactatgcctaaatacctgaaaaatgagcatagcaattaaatatttttagaaatggaaaatgataaagaaataggaactaatttcattgccaaagaagaagttcctttgctaactgtaaatcaggagagattctcaaaggagactacaaattgaatttcaaaagcaggcaggagtacgaaaactaagtatataaagaagtagagagaaaaagagaatgaagagaaacctgtttgagtgaaataaaaggaaaactaggtcaatgaaacagtaaaaaaaaaaaatacaaaaacttgtgttcttccataactttccacatgtgcatgtattgtctttccaaccacactgcaaattccttgaagacagaaactatgtcttacatttctttatatagctcattcatcgagagtggtgttttgcacataactgtaacttagctttttttaaactgatgaattatgactaaatgtccctgaaccaaatactgtacccatgcattacaattaaatctgacagatgcttaaatgatgtcctaatttgaagtgctgcacatatcaaaaagatacttcaaaatccagattagcttttaaaggaaaaagtacaggacaattactatttttcaaggccaaaaagaaaaaccatcttatgctagtattttagtcgtgacaaacatatatcccaatattttcattagtaataatactgccatttttaagcctgtccttgtgctaaacatttttcatctaatatcccatttcattcattcattgactcaagagacattggaatccctatatatcaagccacggagaagacaatgacaaggatcacctcatcttactgacaaagagagcttcattcttaaattgttctacaaagtgtagttcttggagtttatcacaccattttcactcataaaccaaggaattgtttaaagttagttatattattttatgaatgcaattacaaaatattcctaagtatgatcttcataaaaattgttttaacttattagttgacatttaaatcaaatatgttataacaagatccatattatgtcccccaagggaaaaataaaaaacacaaactttcaattaatagactctttagagcaagagtcagcaaaagagccagacagtaaacatttcaagcttcaaaggctatatggtctcttcttccataggaagatatcttttatgatcgaaatgtagagaaggatttcctaaaacaataaaccaaaaacacaaatgagtgaaaacacagcttcattaacatgttaaacttctatttaaagatacatattccttaaagaaggaaagaaaaataggtaaaaagggggcacaggctgacagaagatacttgcagtgcttacagtcaagtgaggatcagtatctacaacatataaagaattccaataaatctatttttaaaagacaaaccctacagaaaaccaagaacaggcaaatcacagaagagaaaagctgaaaggctaataaatatctgaaaagatgtgccatctaatgtacagcttcactagtaattaggaaaatgcaaattaaaaccataattagattccatttcctatccaccagattgggtactggagaggatatgaagaaactcttattcactgctgatcgaagtataaattggcacaactacttgagagcaaattggtgatctagtgaaatcaaagatacatataccctttgacccagcatgacactgttaggtatacatgctagaaaaactcttgcacattaagacagatacaagaggaatattaattgcagcattgttttaatagtgagaaaaacaagctacatgtatcaacagaaggaatggatgagtaaattgtgggctctttccaatcaatggaataatattataatgaaaatatatgaatgacagttgtatgcatcgacatcgataaacatgaacaagcagttgaacaggctgagtatggcttaaacaaaattgtattttccccataaaattctaaataagttgatgatagaaataaaaatataaaacttcaggtagagagtgaggaatcaagactatggaagataatcttaaaagctaacaattgtcatgaaaaacatacctgaaaaatgctagaagtgctggaaaaaaaaaaaaaaacccacagtaaatatactctgttctggtttctcctcagttgtttcatacccagcagaatagctttcatcttaacacctcctcctcaaaagttttcaacctaatttattaggaaatgggttctcaaattagggtccatgggctattacagatcacccagaaactacagacacaattttgtgtgcatttttagaaagtgaacccctaactttaatcaagtgctcaaagcagattgtgactgatttgggttagggctttattccagaatttatatctggttttttaacgaaaatcaaatggaaacaacattttctttataaccaaattagccagacatagttattctgtaaaggaataaacaacagccaagagaatttcataaagtttcctccactgcttctgaactcatttctattttaatgtttgttaattacctaatattaacataaggctaaaatactcagttcactaatgtatatttctaacttcattttacagataaaaaaggaaattcagaagaattcaaattcccacaaaatacacaataaatttgtggagaagttgaaattcataaccttaaatctttaaagtgaagctttaacaggattgttttcatctaccacttaagcaaaaaagcaaaacactgccctttatttcaaaaagtcatgcatatgaagagctagtggtaaaaggccaatgaacatagaattatactacaaactttgagacataaaaaagggttttttaatctttatcaaccatttgctgttgtccaagccatctaaacaggtactgaatgcccgttgtgcaaaatctcacattagcacacactctagtaagatagcaaaagtaacataactataccttttcaactattctttttttaaaaattcaaacagtagtagtaccctactgccaccgtttcatgattagactgcacaaagcagctgtttatccactcacagcaaccagcaggtgaacctgattcaatatttatcacaggctttcatagatcactgctaaccaagcaaacgttttaattaagctggaacttgcttcaaagagctcattcaagatgtcaatcagcaggtaggggatcagatacagtgtcaggtgagagtgtgtaatacaaatccacaactttcttcatcccatcgctgtaaattagcctgctctaaagttcagactctgattgtaacagactgccagtctcctggaatgtgtaactgaagtcactcaaattctattgtgaaggttgtaagcaatatgttaaactgcagtgggctagcacattaagacagatccttttcacggttgttttttgataccataagtgtttgttaccctactctccacttactgtttactttcttgcctagtgtaaatgggaattccttaacacagttgctccagtttctgaaaagtctgtgtttcaatagagtaaatcaataagaattatcagtttaagaacaagcatatcataaagatgactgacctgctataaagcaaaaattatcctggtataatagaactttacatagatgtgattatagcaatgagtctcaaagcagtgatgagtcacaccgatcaacttcatgagaaaaacccagggtgtttataaaaaataaaaaggggaaaaagaagactcaaacgagcaaaatggggaagtgggcgggtaggcggaaaatatcttctttaaataagaatgccagctaagaattgtaaataaaatgatagaattttaaaaatcaccattttgcaactttcctgtactaactgattcaggcaagttacataaatggatgctgaaatctttcagtgaaaagttattagggaacagaatattgacaaagtctcaaaatatcaccccacagattattcattaattacaaaaggaaaatgtacctttacaatgaagagacctggcagtgacactctaaccaagtggtgaaattcagcatcaatggtattgagactaactggcttcatatgcctcctgatataagaaatatactcttgtgcccatcttcaataaaactacatgattattaaatccaaacaatcaagacatgaatcaaaaagaacctgggaatagagaaactgtggtaaaaagacatatatgtattatttagtcggtgaaaattcatccaattgtaatttatgatatgtacacttggttatagattgtatttcaaaaaggcttttaaaaaaaaccctatctcttgagattgcaggtaatttttactttctcctttatggtatttttcaaactttcttcaatgaaccttttaaaatgagaaaacaatgctatcctatcatgtcattttccacatattaaccaaaatgctataaacaaaacatatgacatagagatttgtgcttctatgggctttaaaaattaaatggttattattacatacaagtctctaaagcagcactacccaacaggattttctgtgatgacagcgtatttgatatctgcactattcaatatatttggcattagccgcatgggcacttgaaatgtaattagtacaactaactgaattttaattttaattaatcaaaaaacataaatacatgtggctagtggacagaatacatttaaagtattatcagagattctagaaaaccaatggttattgcaggtgcattgtatgtgtgagaaattctcttcgtaaattcaagttagaaaggaaaaagcaaaagtacactgtaaaaattgtgtgctcataggtaaaaatgggttctgcaggttgcagctcatgaaaactgggttcacaatttttgtagactagtaaactacttttcttaatcttttttgttctaatttttgtctgaattccaatcaaaatcccagcaagatttttttttgggtaatctaaatttaatcttgaaaataaataagtgagaataaccaaaactttttggaaaaataagatggggacaggtgtgatctctcacacctgtaatcccagcactttgggaggccaaggcaggcatatcacttgtgcttgggagttcgagaccagcctgggcaacatggcaagacctcatctctaaaaaggggggaggggggggaaagatgggcaagtagggtatatatttctatagatgtaagaatttcaaatatatgataaagatgctgtattaggcacctctatggacatgtgtccacctacttactctgaaatcatctatatcccctgctgaaaggctgaacctaatatccacattaataacacatatccaaagacactctcaggcatagcaagatcaattagtttcactttcccaagaacttgtatttggggcatttagactgagttgattaattacagaaaataggccacatcatttggtagattttaggcttccactttgagatgtcatggtaaggtcatatgaaagagtgtaagtatctagaaaaaccaatctacaaaaaataatgagaaaactttgctgagaaatgcagatgtcacaccagaggccccaaagagaacagagaagctgcctaaaaacttttcatttccaatgaggggaattatatctcctgcatgatctttcttttagcgggtttctatttcttaaaaagcagatcactcccttaaaaatctgatttaaaaatgggccaaaaatttgaatagacatttctcaaaagatatacaaatggcaaacagacatatgaaaaggtgctcaacatcactgatcatcagagaaatgcaaatccaaactacaatgagatataatttcatcccaattaaaatggcttttattggctgggcacggtggctcacacttgtaatcccagcactttgggaggccgaggggggcagatcacctgaggtcagtagttcgagaccagcctggccaacttggtgaaacccaatctctaccaaaaatacaaaaatcagccaggtgtggtggtgcacgcctgtaatcccagctactcaggaggctgaggcaggagaatcacttgaacccgggaggcagaagttgcagcgagccgagatcatgccactgcactccagcctgggcaacagagtgagaatttgtctcaaaaaaaaaaaaaaaaggcttttatccaaaacacaagcaataacaaatgctggcgaggatgtggagaaaagggaaccctcatacaccgttggtgggaatgtagattagtacaaccactatcgagaacaatttggaaattcctcaaaaaactaaaaattgaattaccatatgatccagcaatcccactgctaggtgtatatccaaaagaaagaaaatcagtatatcgaggagatatctgcactctcatgtttattgcagcattattcacaatagccaagatttggaagcaacctaagtgtccatcaacagatgaatgaatgaagagaatgtggcacatacacaatgaagtactatttagtcataaaaagaatgagatcctgtcattttcaacaacataaatggaactggaggtcattatgttaagtaaaataagccaggcacagaaagacaaactttgcatgttctcactcatttgtgagagctaaaaattaaaacaggtgaactcatggagagagagagtagaagggtggttttcagaggctgggcaaggtagtctagggaggggagagagtggagttgttaatgggaacaaaaaagtagttagaaagaataaataagacttagtatttgctagcacaacagggtgaatatagtaaaaaataatgtaattgtacatttcaaaataactaagagtataattggattatttgtaacacaaaggataaatgcttcaggtgatggatacctcatttaccctaatatgattattacacattgcatgcctgtatcaaaatgtctcatgtacttcataaatatatacacctactatgtacccaccaaaattaaaaattaaaaaaaaaaaaagcaaaccaccctgtttaaatcaggtggcatttcaaatctgtgggggaaattattcaactaatatttagatgaatgactatttggggaaaaaaattagatcctatctcccaccttacatcaaaataatttacagttgaattaaagatcagtatataagaactgaaaccacgagacttccagtctaatatggcagattaggtacacacatttgccctccttcccacctaaaacaccactaaaataaacttacttagtagctgaagttgcaaactggaggtccacaaatcatacctgcttcacaatcatgttttgaatggctacacagagttttataaatttgaactacttaaaaattatgagatgaaaatccatagtgctggtttcttctagaaaaactggttgactggccacattaggcctgtattcttacaggacagcaatccactaacattgactagattgccacatttggatgagacatatactctcaaggtatcacagtccctgccacttaaagaatgtaatcacatgcacttatacttagaccccttctttcattcatgctacctatctggtgctcatttaagttgccaaccctggttacaaaagtgtaaaaagggccaggcacagtggctcacgcctgtaatcccaacactttgggagaccgaggggagtggatcacttgaggtcaggagttcaaaatcagcctagccaacatggtgaaaccctgtctctactaaaaatacaaaaattagccaggcgtggtggcatgcacctgtaatcccaactactcgggaggctggggcaggagaatcacttgagccagggaagcggaggttgcagtgggctgagatcccgctattgcactccagcctgggcaacgaagcgagactctgtcttaaaaaaaaaaaaagaaagaaagaaagaaagtacactccacagagtgggagggggcttgagcaagaggctcaagagcactggttacaaaattttctggagtttaaatactctctagaggtttccattggttattttgttgcacactatgtaaataaacacgtggcctgtgaccagtctgattggttgtgggaggcaaccaatcagaagctgaagggaagctacagttacatcctatgcaaaggaagacatggcccatgaccagtctgattggttgtgagaggggaccaatcagaggctgaagtgaagttacagagttacaccctatgcacatgaagactggttgtgggaaggagaggtactttccattctttaacctgccattcagtagaaaggcagggtgttgcaaacagagtagcctctgatccttttgttacttgggggtggagaggtgagtttttctttttgattcagttttaggaagtcagtgtgaatcggccttaggttccctgcctccagaccctattctcctgcctcaatttcattctctttttttttcttgtattttttacctttttatttttaattttatttttttttacagacagggtctcattctgttgcccaggctggagtacagtgatataatcatagttcactgcaacgttgaactcctaggtttaagcaatcctcctgcctcagcttcccgagtagctgggactataggcacatgctaccacgcctggctactttttgcattttttgtctttttaaaatttttcttaagatacaggatctctctctctctctcgcccatgctggagtttaatggcacaattatgactcacttcattctcaaccctcaacctcctcggctcaagtgatccttccgtctcagcctcccaagtagctggggctacaggtgaatatcaccacatcaggccaccatttcattctcagcagatattgaaggctcaatgaatattactggtagaaataagcaacaaaataaataaatctcacattaactaaaactgcacatgaaaacatttgttaatgactaaaaattgtcagaagaatcagtaatagccaccagtaaaagaactaaatgacagaagacataataaaaacctcgtgtgactggtttttgatgtgaaaaatataaattaatgaatgaaatgtcttccctataagcgttacataaaattagtaaatgacaaaaaataaaagacaataaaagaagaagaaaagctatttgacgaatagactgataatgggattctcatcatttttttctgtaaaatctttgatgttactagaatttttataagcaaatatcacttttataaaaacaattacattttttaaaaacatacacagaaaagaaaacaatatacagggtagagatactaccaaaaggagaagtaactagtttttcagggcttgcagaatcattttactcaatttgataagatttttgtcgtactaatagatccagttatgtgccctctgggaaaaatgcaccaaaaagcgccaaggaagaaagggaactggacagactatccagtaaggccagtcaaatcaatcatacaggttaatgagatgactgaataggaaaacagactgctctcacatctactattgttcagaatattagattaaggaaagagctgagacaaggtttccttgtggaaggacaggagaaaacataacatggttatagctaaggaaaagaatcaatagaaaggaggaaaaataattgacaaacatccagtgatgtgtaaatgtgtagtgggatgtgaatggggaaaagtttgtgtttaaaaaaaaaaaggccctgtatgactaatatggggaccaacaagttttcagtttaaaggtgggacggttccaaatgacaacgaagtcccatgtgtagtggtgctgttgaattaatggctaaattaggtcgtaagtttcaagaaggctgaggaactatggtcaaaatagcagatcatcaacacagatcatgaagtaccccaggatggtgactgcttctcctactccagattcactgagtaacaaggagaatctgacatttttactgccctgatgtgtgcctacttcactaaacctcaaaagcatctttctttaaaagattcatacatgtttccaatgctgttgtcaatatcaattatcttctgaatgaaacgttaaccttgcacaagtaatgcaacatctggcttatagtagttttcacttagaacaatgcatatatttgtttaagttttccaaaaggccaacatttaaagaaacaataaatgtccttaaaaatatgattgtatggccttctgcttttagccatacgaaaaaacagaaatcttatcttgcaccataaactactaacaaattggacaagatatatgaaacagtacttttcagacactgaattgtgatctcagagaaaaggaaacaaagaggtgataactacattactttacttctacagatgaaaacacaataactgaaaagaaaaatccactagtaagatttaacaccaaattagaaatagcagaagagatcaaggagcttgacaaatcggcaatagaaggtagacaaaatgaagcacaaagaagaaaaaatagcttaaaaaatgaacatatagtcagtgatgtataatatcaagctgtctaatatacacataattgaagtctgaaaggaaaaaaatgagtacttaagaaaatatttttaaatggctcaaattgttcataatttgatgaaaactataaaaccatagatccaaaaagctcaatgaccccaagcacacaataaacacacacacacacacacacacacacacacacacacacaccttagttgaattgctgaaagcagagataaaaatagaatttttttttttgagacggagtttcgcagttgttgcccaaagtgatctcagctcactgcaacctccgcctcctgggttcaagtgattctcctgcctcagactcctgagcagcagagattacaggcatgtgccgccgcacctgcctaattttttgtatttttagtagacacagggtgtcaccatgttagccaggctggtctcaaactcctgacctcaggtgatccacccgcctcagcctcccaaagtgctgggattacaggcatgagccaccatgcccggcctaagatagaatttttaaagcagccacagattactctatagaaactatgtaagacaagccaagggcagaatatcttttaagtgctgaaagaaagaaaatgtgaacctaaacttcaatacccagtgaaaatgtgtttcaaaacaaagcgacggttcctatcaataacccaatgaagtttcttgcagaaatagaaaataccatcctaaaattcacatggattctcaaggaaccccgaataaccacaataatcttgaaaaagaacaaaactggaggtctcacattttctgatttctaaacttactacaaagctacagtaagaaaaacagcatggtactggcataaaaacagaaatatagaccaatggaacagaatagaaattccaaaagcaaacccccacatatatggtcaaataattttcagcagcctatcaagaccattcaatgggaaaagaacagttttttcaacaaatggtgcagggaaacctggatatctacacacaaacaatgaagttgcaccattataatatatggaaaaattaactctacatggatcaaaaccttaaatataaaagctaaaaccataaaacttttccaaaagcactggtgataaaaaatggacttcatgagataaattggactcatgaaaattaaaaacgtttatgtatcatagaccaccatcaacagagtaaaaatgcaacacaccaaatgggagaaaatatttacaaatcatgtatccaataaggtattaatatctggaatacataaagaacttccaccaactcaacaacgacaaaagcaatccaattccaaaatggacaaaggcaacatcatactgaatgagcaaaagctagaagcatttcccctgaaaaccagcacaagaaaaggaagcccggccgggtgcagtggctcacgcctgtaatcccaacactttgggaggctgaggcaggcggatcgcaaggtcaggagatcgagaccatcctagctaacatggtgaaatcccgtctctactaaaaatacaaaaaattagctgggcaaggtggcgggcacctgtagtctcagctactagggaggctgaggcaggagaatggcgtgaacctgggaggcggagcttgcagtgacccaagattgtgccactgcactccagcctgggcgacagagcaagactctgtctcaaaacgaaaaaaaaaagaaaagaaaagaaaagaaaaggaagccctctctcaccactcttattaaacatattattggaagtcctggccagggcaatctgacaagagaaagaaataaagggcatccaaataggaagagaggaagtcaaactatccctctttgcagatgacatgatcctatatctagaaaactccacagtctcagcccaaaacctccttaagctgataaacaacttgtcaggatactaaatcaatatgcaaaatttactgacattccaattcaccatcaactgtcaagctgagagccaaatcaggaatgcaatcccattcacaattgccacaaataaataaataaataaataaataaataaataaataaataaataaaataactgggaatacaactaaccaggtaggtgaaagatctctacaaagggaactacaaagcactgcttgaagaaatcagagatttcttacaaacaaatgaaaaaaccttccatgttcatggataggaataatcagtatcattaaaaaggtcatactgcccaaagcaatttacagattcaatgctattcctattaaactaccactgacattcttcagagaactaggaaaaactcttttaaaactcatatggaaccaaaaaagagcccaaaaagccaaggcaaccctaagcaaaaagaacaaagctggaggcatcgcactacccaacttcaaactatactacgtggctacagtaatcaaaacatcatggtactggtacaaaaacagatacatagaccaatgaaacagaatagagagcccagaaataaggtcacacctacaactatctgatcttgaacaaacctaccaaaaacaagcaatggggaaaggattccctattcagtaaatggtgctgggataactcgctaggcatatgtagaagattgaaactggaccccttccttacaccgtattcaaaaattaagatagattaaagacttaaatgtaaaacaaaaactataaaaaccctggaagacaacctaggcaataccattctggacataggaacaggcaaagatttcatgatgaagacaacagaagcaattgcaacaaaagcaaaaattgacaaatgacacccaataaaattaaagagttaatgcacagcaaacgaaactatcaacaaagtaaacagacaacctacagaatgggagaaaattttttgcaaactatgcatctgacaaaggtctaatatccagcttccataaggaacttaaatttacaaaggaaaaacaacctcattaaaaagtgggcaaaggacatgaatggacacttttcaaaagaagatatatatgcagccaacaatcctatggaaaaaagctaacattactgatcattagagaaatgcaaatcaaaaccaccacaatgagataccatctcacaccagtcagaatggctattattaaaaagtaaaaaaaaaaaaaaaaaaaaaaaaaacagatgccggtgaggttgcagagaaaaaggaaaaaggaacacttgcacactactggtaagaatgtaaattagttcaaccattgtggaagacagtagacagtgtggcaattcctcaaagacctaaaaacagaaacaccatttgacccagcaatcccattactgggtatatacccaaagaaatataaattgttctattataaagacacatgcacacgtatgttcattgaagcactatgcacaatagcaaagacatggaatcaacctaaatgctaatcaatggtagactagattttaaaaatgtggtacatatacactgtggaatactatgtagccataaaaaaaatgagactgtgtcctttacagaaacttagatagagctggagaccattatccttagcaaactaatgcaggaacagaaaaccaaatactgcatgttctcacttataagtaggagctaaatcatgagaacatatggaaacataaaggggaaaaacacacaatggggcctatcagagggtagagggtgggagcagggagaggatcagaaaaataactaatgggtactaggcttaatacctgggtgacaaaataatctgtacaacaaaccactaccacacaagtttacctatataacaaacctgagcatgtacccctgaacttaaaataaaaattaaatttaaaaaaaatggggctgggagtggtggcttacacctgtaatctcagtactttgagaggtaaggcaggaggatcacttgagaccagaagttcaaggctagcctggccaacatggtgaaaccccatctctattaaaaatacaaaaaattagccaggcgtgggggcacacacctgtaatcccagctattcgggaggctgaggtgggaggactgcttgatcctgggaggcggacactgcagtcagctgagatagtgccactgcactccggcctgggcgacagagtgaagccctgtctcaaaaaagggcaaaggacttgaatagacatttctccaaagaaaatacacaaatggctaataagcagaagaaaagatgctcaacatcactaatcattagggaaatgcaaatcaaaaacacaagataccacttcacacccttaaaaatggctattctttaaaaaggacaacaaaacagataatgaggttggcaaagatgtggagaaactggaacccctgtgcattgctgatggaactgtaaaatggtacagccactgtgaaaaacagcttggcagttcctcaaaaacttaaatatagaattaccatatggtccagaaattccactcttaggtgtatacccaaacgaatgaaaacagagactcaaacagatacgtacaccaatgttcacagcagcattattcaaaatagcaaaaagatggaaacaacccagatgtccactggcagatgaacggacaaacaaaatgtggtatatccatacaatggaatattattcagccataaaaagaaataaaattctgacacatactacatggtggatgaccttgaaaacattatgctgagtaaaataagccagacacaaaaggacaaatattgcatgattccacttacatgaggtatctagagtagtcaaattcatagagacggaaaggagaacggcatttttcctggggctggacaatagggaaatacagagatattgtttcatgggtatggtgtttcagtttggaaagatgaaaaggttctggcactagataatagtatataaatatgcataataccactgaatttacacttaaaaacagataaatggtaaattttatgttatatatattttaccattaaaaacatgaaggtaagaaaaaaagctgaaaaaatatttgcaatgcaaatgttaaataaagctctttaagctaatagaaaagttacacaatacagaaacttggacctacaaaatgaagggcaccagaagtgaaaaactggagggttaagaaagaaattattttcctcatttgtaaatttgtacatagctgatgatttaaactaaaaataacaaaacactgtgagggctatgacaaatgtagaagtaaaatatttgacaaaaatggcacaaaacatgggagagtagacacggaagtatattggcagaaggttcttacacattatttgtgagttgaaatattatttgaaggtacactgtgataagtttaagatgcaaagtatgaagcaactcacaaaaataaaactaagaggtatacttaagaagacagtggtgaaggtaaagtagaatcctaaaacatgtttaattaattcaaagaagacagaaaaggggaataaagaaaagttggaacaaacagaaaacaaatagtaaccacagtgataattacactgaatgtaaatagtataagtgttccaattaaaaagaagaggttgtcagattggataaataaagaagacaattatttataagaaacttatcttaaatctaaagacacaaataggttaaaaataaaaggatgaaaaatatatactatggaaacattaatcctaagaaagctggagtggctatatcaatgttagccaaaatagatctcagaacaaagacatttcataatgacagatgggttaatacatcaagaagacataataatcttaaatgtgtatacagctaataacagaccatgaaaacccatgaagcaaaaactggtagaattgaaagaaaaggcaaatccacaattataggacccttacagtattctctaattaatttataagtagaccaaaaaaaaccagcaaggatacagaagatcttagcaagataatcaacaaacttgacctaactgatttttataaatgaatacccatactttccaaaaactcacagagcatttgccaagacagatcgtcaaatttaaaagaactgaaatcatatagaatctattctctaaccacacaaaaataaattagaactcagtaagagaaaaatatctaggaaaaaacacctagttagtgtttatttagacttctaaataaatcttgggtcagagaagaaatcacaagggaaatcagaaaaaaatgtaacaacatcaaaatttgtgggacacagataaagaagtgcttagagggaaatgtatagctttcattggtgttttatttaggaaaaaaaaaggtccaaaatcagttatcaactatttaagtttcaatctttttttttttctttttttttgagacggagtttcgctcttgttgcccaggcttgagtgcaatggcacgatctcagctcactgcaggctccgcctcctgggttcaagcaattctcctgcctcagcctcccgagtagctgggattacaggcgcccaccaccatgcctggctaattgtttgtatttataatagagacagggttttgccacgttggccagcctggtctcaaactcctggcctcaggtgatacgctcgcctcagcctcccaaagtgctgggattacaggggtaagccaccatgcctggccaagtttcaatcttatgaagctagcagaagagaaaattacatccaaagaaagtaaaacaatggtaattaaaaaaaaaaaaagcagaaaccaacaaaatagaaaatggaaaaacagaaagtcaacaaaaactttttaaaagatcaataaaatggataaacctctactacctattacagattgagcaaaatgaattctagattaagcaaaaaaaaggagatagacacaaattcacaaattatgaatatcagaaatgaaagagggcatatcactacaaatcctacagacacttaaagaaataagagaatattttgaacattatgccaataaattcaaaaacttgaatggacaaatttattgaaagatactaattactaaaactgactcagaaacagaaaatgtgaatactcctatactcatttttaaaattaaatttaaaagtaaaagtcttcccaaaaataacacataagggcaagatggcttccctggtgaattctatcaaaaatttaaggaagaagtaatatcaatacttcccaactcattttataaagccaacattaccttgatatcaaagccagataaagacattacagaaaactatagaccaatattcttatgaacatagatggaaagaatccttaacaaaatttagcaagtcaaatctaacaattatataaaatgggtcctataccatgatcaagtgggttttattccactaatttacagtcaggccaacattcaaaaactaatcaatgtaatttaccatatcaacaggatataggagaaaaaacatataatcctaccaaggaatgcagtaaaactttaaatataaaatccaacatccactcattataaaaatgttcagccaactagcgatagaaggaaacttctttagcctgacaaagggcatagacagaacacctagcacaaatgtcatacagaacagtgagggaccagaatgttttccaccacaaggttgtgaacaaggcaagggtatccactctcatcactctaattcagccttgtactgcatgaaaggtaaacactgtaaaggaagaagtaaaacagtatttactagagaatgaaacatgcaactttgggtacttagaaagtcctaaagaaactccaaaaatatcaactagaaccaataagtgatataacaagttgcaggttacagggtaaatatacaaaaatgaattctacttctataatagtaatgaataactggaaggaaattataagtggaatcatacaatatctgtccttttatgactggcttattttacttcacataatgtcttcaagtttcatctatgttgtagtacatgtcagaatttccttccttttaaaggctcaataatattccattgtatgtatacaccacattttgtttattcgtttatttatcaatggacattttggttgtttccaccttttggctattgtgaataacactcctatgaacactggtgtacaagtatctgagtacctgctttcaattcttttggatatttgcctagaaatgttatttctggaccatatggtaattctgtttttaactttcagaggaatcaggaacaaggtttttcagttaaacatacagaaaggaagaaaattagaatgggccctctggtactggaatggaactggatgtattggtataaacactcataattttcagtgtacagacagacagatacagaaaaaatatagacataaatgtatatgtctatgagtctgggtttgtgtacacaatacattgtgtatattctctagctgtctgctgaaagggcctggagcagcaactccaacagcaatgagcaaaactaactcccagaacacagcgttcaaatgttatttttcactaaatggaaccagggttccttggagaaatgtctgaatccgagactagggcagggaaaatataaggtgagcctggaacactatcttttgccaaaaaataaggaagcgttccaagaatgattgatatatgtcagaaagacacaagcaacttaactggtttcccacttgagtaccaaaacaaatcatataataattataactcaccgaataaaatggaaaatcacaagtccataaagatataaataaaatgagtaaactgaatttttgtaaggacatgttatttatataatttcagagttcttccccataaagtcctcttttataaaggcaaaaagataactgtaaagttatattttttacctagcagatatcatattaatcaagttatcaatcattaatgagaaaaaatgaaactgcgtgccaccttataagatgcaatgagcagaaggcatcacttctgtgacattcctgccaaagataaataacctcagtctaatgagaaaacccaaattaagagacattctagataagctgtaatattctgaagtgtcaaaatcatgacagtcaaggaaagactgaagaagtgttccagactgaagaagttactaaagtgataactaaatgcaatgcatggttctgactggattcttttgcttttataaaagcgttattaagacaactgctaaaatttaaaccggttctgagtattagatggcaacaatgaatcaattttaacttcctgattcttatggttatattgtgattatgtataagaatgtctttgcttataagacatagacactaaagtatttcagggtgagggaacatcagggcaacaacatactcttaaatggctcaataaaaaaagatatttggattgtacttccaatttctctataattttgtgacagccaaacttttaaaaagctaaaataaccgaaagataaatttactgggcagacagttggtcaattaacgaagtagttttcaaaggtaaagttatctttccacacccagtatccatgaatgaaaacgttctacatgacaattgcagatactatcaccactgaatagctacactcatgtcggatgggttgctatacatatttatttcattaatgtatctacacatcaagaaaacttagaggagtggctgaattttgtcaactttctctgaaatattcaccaagttcactcaatatgataaagaagatttgaaacttttgagaattaaacatttccaccatagagaatactatgttttctccaagctctcaaaaaattataattactgggccaggcacagtggttcactcctgtaatcccagcactttgggaggccaaggcaagcggatcatttgaggttgggagttcgaaacatgcctggccaacaaggcgaaaccctgtctctactaaaaataaaagaaattagccaggcatggtggcaggcacctgtaatcccagctactcgagcggctgaggcaggagaattgcttgaacccaggaggtggaggttgcagtgagccaaaactgcaccactgcactccagcctgggtgacaaagcaagactccacctcaaaaaaaaaaaaaaaagccataattattggagctgaaggacatactcaagcaattagtcatccattctatcatcctacccctaggcaaatttgcagacaaggcaagagattcacactaactccactaacctctggcctaacttaaccaagattacaatagtatagaacgggctggcaaactttttctctaaaaggccagagattttcctgctggctgaacatgaaaagaaagaaaagaaaaatacataaatagacagagtatatattttaggttttgtgagccatatggtctctgtcacaactactcaactttactgttataacgcaaaagttccacagacaatatgtataaacaaatgtaaaatgcgttcaaaaaaactttatttataaaagcaggcagcaggctgtattctgcccatgggtcatagtttgccaaccactggcataggaaaaaagattacgacaaaaaagtatccatcaaaatagacctgctaaattttactatgaccgtgatatattaggtgaaaaataaaagctatatactataatcctaattttgtgtgtggggagggagtatatatgtaatatatgtgtaatatatgtcatatatactacataacaaatatatgtaatatatactacagtatcaacccctttacaggggttgagctctgtacaacacctgattgcaggagtgagccaccacgctcggcccaataattacgatttttttgagagcctggagaaaacatagtagtgttctctatggtggaaatgtttacatatatactcagttgatactgggtatatatgtaatatatactacgtaacaaaaatggcaacaaattctacttatctttgtatataagctccctttcaaggttactttgtagctcttcctaccaagatgtgagctttaccccttgagtctggatttggtcatgtgatttgcttttggtgactggaacattagcaaacctgacacaaacagactcaaaaggcatttgtacactggggcttgttctcttgctgctcttggaaccctgaggccaccatatacataaaccagaattagcctgctagatgatgagagagacccacctcatggtcccagctgactaccaatcaactccctgaagcagggctgccttgctgacttacagctgacctgcagttgaccacagacacatgagtaggccacctgagatcagcagaagaaatgcccagctgagcccaccctaaattgctgacccccacaacagtaagctaaataaatggttggtttgttacagcaacagataacattgcatgtgtgtgtgcacgcacatgtgcgcacttaagaatagacagcaggcagaatatcaggggttgatattgaggagacagtttaattaaggattaatgttaataatttaagtacacattttggtggttcccaaattttctcttagatgatgcttttatattcagaaaaaagttatttagaaatataaaatttaattcaatataaaagagtatttttcattatttccactaaatattgaaagtctaaaaatatggacatcttgacctgatgtatttaaatgaactgatagattttactttctaacagagagtttggagataaatagttacaggtacataggaaactaagcaaaggacaagacaactactagcaccaaaaaaaataaatactggtttggggaaagaactgtaataagtttaaatatttatagaattataacaatacaaataccaaatgctggcaggctgaagggtagaagtaatgagaaaggagaaaagaataggaggaagacaacagaaagtatctaaaaccgaaaactcaagagaaaagcaaaatatgcatgctacttcaaaaactatcagaatacaaaggataaataattgaaaattatttacttcagatagtgggaattggtgaataatagaattagggcaggggtctactgcttttctgtttgaagccaagtggaattctttgacatattttttcacacatactgttaaaaaaaaaaaattaaagagaaaaaaaagtccaggaaccaatccaagtacatataacaatttagtacatgataacagcaaaacttcaaaactggaaaaatgattaagtgacactgggacaactgatcaactatttgggaaaatatgcaattagagcctgacctcatacatgcatgaaaataaatcccataaacaagagagttaaatgcacaaacaaaactgtaaaagaactattaaaaatatccttataaatttatagaaacggatctagaaagatcctcatgaaagtgttcatggtgtttccttctggaaagcagaaagggagatggggttaacataagggagaacattttaatttttattctgtattggtttttataatgttaaaggtttttcaaaaaatgttattactcttttttttttttttttttttttgagacaggttttgctctgtcacccaagctggaatgcagtggcatgatcacagctcactttaacctctacctcccgggctcaagcaatcctcctgcctcagcctcctggtagctgggaccacaggcatgagccaccacaccaagctaattttgtttgtttgttttttgtagagacagggtcttgctatgttgcccaggctgatctcaaactcctgggctcaagtgatccacctacctcagcctccccaagtgctgggattacaggcataagccatcatgcctggccaaaaactatttttaaatctgcattaagtcacctgtatttaacaatactgtcataccctcttaggtataaggatctgagtaaaaattgtaagctacaagaaacagtggtgaatcatacatctacttaactatggccatttttttcattcatttattcaacaaataatacaagtagctactaggtgcaggctctgtgccagatgctggttataaaaaactgaaaaaaagagacattacacttgtccttatggtcagtctggtaatgagacaaacaaaacaaaaaacagttaaacctacaaataaataaataattataaatttgggtaagcattgtaaatgcttagatttggtgttgagacactaaaaaagggacgaatcttgaataaataacctgcatggtaatgcatataatatgacctgtaacagtataaaaatgaactgtcatcaaaaagtcatctggaagagtttattcagagacagaatagtgaggtggtttagaggatcaattccagagccagactgcctgggttttaatccagcttctactcaccaggtttgtgacatgaacaagttattcaaatactctgtggctcagtttcctcagctataattgcggaaaatattaataccttcctgatacggttgttataaagattgagttaaattcttttattttgaaaactgtcaaacccaaagaaaagttaaaagaacatgacaataagcatcaactcacatgaacctgtatttgccaggtgaattaatatttctaaagtgcttagcagagtgtctggcacataacacagtaagcaccagtatcagcatatatatgcagttatgttaaatagctattttaaataaaagtaaattaaaaccataaagtaaaagaaagaagggtaggaaggaaggaaataaaaatggggtatgggaggaagaaaaaggaagaaaaatagcctaaggatcgccccagtgttaacactttgtaagaaggtcaacagcgcactctgctggacccaagtgtcttccacacaccaggcccaagttatgaattaaaataatatgctactgctacattaaatcaaatataattactttaattaaagtatataaagaatgttagcatttatttaatgaataaataaaaagcaggtataagcataagaatatatctgaagacaaccctggctattgtgaggatttactaaaaaaagaacagaatataaataaatctagagaaaatgattatgaatgatagaacaaagtaatatcaaaacgttaacatactattctaaaaaacaatgtttttcttaactatattttgaccatgtggagacagatgcttcactagaactttgacatatgaattgtcagattaagaaaataaatctgaactgtaaggaaagggatcaagcaggggacaccagaaagttaattatataagaaaaggtactgacactatcttccgacttgaaaagagagttaggagactagaaatgatagaaaaataaagagacaacaatctacttctccaatccactaggtggaaactaaatgattttcataaaaactaagaaaatttgaagaacctaaaaagtttaatgtcaaattcaggggaaaacagaaatcatcaaactaatttaccatttaatttatggaagaaggtttgtcaaaagtaatgcaactgcagatttgaaaaacgtgaagactaagacacacctttgcagggatgagaattaaaccattaatttatgaatccaaataaatatttctatttaaaaaatactgtactccctagtatcatataataaaaagcaagataggaaaagcgtccttagaatttaaaggtgttagaattcaattagatataacgtatctcctgacctcgtgatccgcccgcctcagcctcccaaagtgctgggattataggagtgagccaccatcctggctaacacggtgaaaccctgtctctactaaaatataaaaaattagctgggtgtggtgacgggcgcctgtagtcccagctacttgggaggctgaggcaggagaacggtgtgaacccaggaggcggaacttgcagtgagccgatcgcgccactgcactccagcctgggcgacagagcgagactccctctcaaaaaataaataaataaataaataaataaataaataaataaataaataaagcatcattaaatctagtctcccattctttttccttccatatgaaggaactggttttcacaaaaaagttacttacccaagtctatcaatttaccttattcaagattattacaaggtctagattaaaatacaacagataaaatgtgaggcattttggtctgaagaaaaaagcaaaaataaaaaaatataaaaaaaagtgaggcatatgatctgtcagcataagaaaagttctaatatatggactacttttttttcaattactttatccaaaagttttggcaataaactcatttcaaaagctgctgtataataaatattaaaacttacgacattaatacacatgaaactatttttcttctacttttcatgaaaccacctatcccaaaatctacagaaaatacttttatgatttataataagtcactttgcaaagactaagaaatgttacagcagaaaccaaagtaatttcctacaaggaaaaatatttactcccctatgacacccaaaaatcccattttttaaataaattacctctactcatatccccattattttttcttatattacattcttggaaataattagtccttgttctctgaaaacctagatgtattatttaatgctagaaatccatgagaaatttactaaaaatttacttaacatacaaaaaggagaaacattcatgctcactaaaactatacattttataataattatatttctattataagtacttatcctatttttatgttaggaagaaaaaaataaagttgaaaatacaaatcattttacctatgtatttttgggtttttttttcccataacctttcagaaagcacataaaattactttatacgtcatgtttttcatcatagactaccatgaaaagaaacaaatattagagctcaaccatatgttctttgcattgcaaaagtgctttgatgtctgttaaatttactttatgcatgtttaattagtatgacatatatctcttacatcttcttgcaaacaaaaattcagtgtcacactagtgaaatgttatcatttgagggactagatttaattgagagatttaacttgttcaagaagttttcagacttatgagaaattgtcagaggcctatatcttaatgttatgagtaataaatcacccacttatgaaaaattattccatttctagagatatgtagagttataccacctaaagccaaggaagaaaatatgcaatttctagcttaaaaataaaacagatataaagatacagatatacaattatagatacagctatattttaccaatgagcagaccataatcaatgatcaacatatatcagcatactacataaccaaaaggagaaatcaatcaaagcattaggcttaaaattaaggtactcaaccaagggcacagtagatgtgcttatggtcaagcggtttagactcaaaagatttcagccataaacatcttcaacagatatcaaaagaatttttggccaggttccgtggctcacgcctgtaatcccagcactttgggaggccgaggcaaacagatcacccgaggtcaggcgttcaaggccagcctggccaacatggtgaagcctcatctttactaaaaatacaaaaatgagctgggcgtggtgtcaggtgctacttgagaagctactcaagaggctgatttaggagaatcacttgaacccaggaggcagaagttgcagtgagccgagatcgcccactgcactccatcctgggtgacaggggagactccgtctcaaaaaaaaaaaaaaaaaaaagaaaaggaattttctactaaactctaaacctaactcctcaaaatttataatgttgatcagtattatcaacaataacattaataatagctttcagcagcatttaaaaataagaactacaaggccaggtgcagtagctcacacctataatcctggcattttgggaggccaaggcaggtggatcgcttaagcccaggagtttgagagcagcttaggcaacatagcgaaaccttgtctctaaaaaagttaaccaaataaataaaatgaaaataagaactacatattactccaagcaacctacagattcaatgtaatccctatcaaaataccaataacattctttacaggaatagaaagaacaatcctaagattcatatggaaccacaaagaccctgaatagccaaagtaatagtatgcaaaaagaaaactgtaggcaccacgctatgtactacacaaagctatagtaaccaaaacagaatggtattagtataaaaatagacacatagaccaatggaacagaatagagaaccgagaagtaaatccaggtatttacagttgactgattttcaacaaagatgccaagaacacatatcggggaaaggactccctcttcaataaatggtgctgagaacactggatgtccatatgcaaaaggaaaaaactagatccctctcaccatctacaaaaaccaactcaaaatagattaaagacttaaacataagacccaaaactataagactactagaagaaaacatagggcaaaagcttcaggacactgatctaggcagattttatgggtaagaattcaaaagtacaggcaacaaaaacaaaaatagacaaataggacagtatcaaactaaaaagcttctgcacagcaaaggaaacaacagagtatagagacaacctgtagaatgggagaaaatatttccaaactattcatctgagaagggactactatccagaatatacaaggaactcaacagcaaaaaaaaaaaaatctgattttaaaataggcaaagggtgtgaataaacatttctcaaaagatacataaagccaacaagaacatgaaaaaatgctgaacatcactaatcatcagggaaatataaatcaaaagcacaataagatatcatctcactcagttagaatggcttactatcgaaaagacaaaaaaaaataacaaatgttagtgacgatgtggagaagaaactcatatactattagtggaaatgtaaattagtacagacattacggaaaacagcaatggaggcttctcaaaaacctaaaaatattactaccatataatcatataatccagcaatcctactactatttatccaaaggaaagaaaatctagagtacagtagcatgatcatatctcaccacagtctgaaactcctagagtcaagtgatcgcccatgcctcagcctcccaagtagctaggactgcaggcacgtaccaccacgcctggctaatttttttaaaaattttgtacagatggggttctcgctatgttgccggggctggtctcaaactcctggcctgagtgattctcctacctgagccttccaaagtgttgggattactggtgtgagccaccacacccagccaacaccatgtttattgcagcgctattcataatagacaaggagttggcatcaacctaaatgtccatcaacagatgaatggataaagaaaatgtgacacatatacacaatggaatattattcagccatagaaaaatattgaaaccttgttatttgcagcaacatgggtaagcctggaagatattaagtgaaataagtcaggcataggcaggtaagtactgtatgttcttactcatatgtaggagctaaaaaaaatgagctcatagaagtagagtaaattgtggttatcagaggttaggaaggggtgaggggaggggaggataaggagaggtgggtttacaaattcataactacagctagattggagaaacaggaggaataagttctggtattctatagcactctagggtaaatatggttaacaataatttcttacatattttcaaaaagctgtaagagagaattctgaatattcgcaacacaaagaaatgacaaatgtttgaggcgatggatatgttaattactctgatttgatcattacacatcatatacatgtatgaaaattatcacactgaatcccataagtatgtataattattatgtgtcaacaaaaataaacaaaaaataaagatcagaactacaaatatgtaatattattagtcggtattatatagaatcttttatcagcagcagctaaaggtaagaactacaaatatgtatccatctgctgctgttactactactacagctgctgctacttctactaccacttggcgcttaaactctaaggtatgccagatactctcagcactgtatagatatcaacttgtttaatcctcctaacggccccgtgagataggtactattactaaccccatttaacaaatagctaaacataataccaagagtttaaaaaatcaaggttatacagttaataaagagtagagctatgattaaaatccaagcagtctcaagatatgaaaataacctaagtgtctgtcaatggatgaataaagaaaatgtggtgtgtatgtgtatgtcaatggaatattagccctaaaaaagatcctgctatttgtgacaacatggatgaacctggagggaggacattatgcaaagtgaaatatgtcagatgtagaaggaaaaatactacatgatctcacttatacgtggaatctaaaaaagtcaaatacatagaaacagaaatcagaacaatggttactggggcagggaggtgggggatttgaggagatgttgatcaaagagtaaaaagttgaatctacataggatgaatcaagtctagagatctaatgaacagcatcatgacaacagttaataatactatattctaggctggatatttcgatattggctttaaaattttcaggtgttctcaacacacacacacacacaaaaggtaactatgtaaggagatgaatatattaattagcttgtgatatgatttggaagtgtgtcccctccaactctcatgctgaaatgtgatcccccaagttggaggtggggcctagtgtaaagtgcttgggtcatcaatggctggtgccctcctcacagtaatgagttgagttcttgctctgaggtcacacgagatctggttatttaaaacagtgtggaacctcctctgctctctcctctgtcctctctttccatgtgacaagtttgctctctctttgtcttctggcatgcttgtaagcttcttgaggccctcaccagaagcagatgctgacaccatgcttcctgcacagcctacagaactgtgagtgaaaataaacctcttttctttataaattgcccagcctctggtattgctttataacaattcaaacagactatcacagcttggctgtagtaataatttcactatgtatatatatattaaaacatcatgttttacacctaaaatatatataatttttattttatgtatttattttttatttttttttagagacagggtctcgctctgtcacccagactggagtacagtggttcaatcatagttcaatacagcctcaatcttctggctcaagggatccccctccctcagcctcctgagtagctaggactacaagtacacaccaccacacacagctattttttttcttctattctttataaagacagggtctcgttatgttgcccaggttggtcttgaactcctgacctcaagcaatcctctcaccttggcctcccaaagtgctgagattataggcatgagccatgatgcctggcccaatctttatttaaaaattaagatcaggcagtatgtgtccaaagtccattctcttaaccaataaaaacaaaacaagccaggtgcagtgattcatgcctataatcccaaaactctgggaggcccaggcaagaggatcactggaggccatgagtttgagaccaacctgggcaacacagtgagacctcatctctacaaaaaataaaaataaaaaattagctgggcatggtgttgcacagctgtagtccttgctattcaggaggctggggttggaggatcacttgagcctgggattttgaggttacagtgggctatgatcacaccactgcgttacaacatgggcaacacattgagaccctgtgtctacaaataaagcaaacaaaaacaattcccaagaaaaaaaaatcttaatcacaggtgactctatacttgatttgtttatctgtgagcttctacatatttctttccttatcttggtgttagaaccctatttaggtggctccaggactgcaaagaggcattttagagagaatataaaataaagtgattagggcatttgccagaacatgagaatgcctaggcaggatttagctctactatttactagctttgtgatcttaggccagtttcttccttctcagagtttcctcatctgtacgatgggaataccaatatacctgcttcataatcattgtaagaactcagtaacattcaacaaataaatatttattagacaactaatatgcaccatatgctattctaggcatgagggacacacatgaaaaagactgacattacatcgtaataggacagacaaataataaacaagtaatcaagtaatttcagataatagtaagcccatgaaggaaaggaaagaaaatgaatgagaaaacactgtggcagagctcaacatatagcttacattataatgatgttgatgattattgcaatttaacagaagaagcttctacataatttctccaactattaatataaagcttcagtgaagatcaccaacaaaacacaaattaaatgtacagtaactgaaaacaaatctgtggttgcctgggaatggggggacagggcagaaaaaaggtccatcagtctatcttgcacttaggatggaccttttctaggcatcattttgcaatatcatgcactggtcatttaaataatatttagttcgctgagtttaagttcattgagttttacagatcttacaaatgttgacacatttcattatataaatataaaaagtcatattctgtaatatcaccaatttcatcagaaaagtctgtagttatcacaaagctgccaagctcagagtatatacaaattttttaaaattctgattttcacttgaaagctcaaattttatctggctcattttatcataaagaattaccatggttagtatatcattcactctttttcaagcaaaaatgatgttccatgacaaaaagtggctagtcagctcacaatccaaactatcctacaggcgcttctccccaggacatccatcctgcttctgtatgcaaaagtgttttatgagttctattcatttcttcagacagaatgttaaaaacctaaacggctgagattaaataaaattagtaatttttactgcttcatcaaagacattcttaaatgaaactggttttttttcaaaactgtgatctaatgatgctggaaaactattattaacataggttgggttgaggccaaggtgggcggatcacgaggtcagaagatcgagaccatcctggctaacgtggtgaaaccccgtctctactaaaaatacaaaaaattagccaggcgtggtggcaggcgcctgtagtcccaactactcgggaggttgaggcaggagaatggcatgaacccaggaggcggagcttgcagtgggcggagatcacgccaccgcacttccagcctgggtgacagagcgatactccgtctcaaaaaaaaattaaaataaataaatttaaaaaattatatacatatagagagagagagagagaaaaagagagagagagagaaagagagagagagagaggttggagccaataccttgatttctgctaaggcaccaacagttttacccattcttgcttttgcgccaccagtacaaatgtcaagacaatccaaaaggcaataatgtattttttcctttttttttttgagacggggtctcactctgtcatccaggctggagtgcagtgtggtgcaatcttggctcagtgcacctttgcctcctgggctcaagccatcctcccacctcagcctcccaagtagctgggactacaagtgtgcaccacaacacccggctaatttttgtattttttgtagaatcagggtttcgccatgttgcccaggctggtttcaaactcgtgaactcaagtgatccacccgccttggcctcccaaagtgctgggattacaggcgtgagccaccacgcctggcctacaacatcttaatattattacaaaaataattttcacctcacagatcactccccaaaaaaatctcaatatctagaactccttggactactccttgagaactgttgccctaagaatcctgaaagaactgtaaggagttggagaatttacaaacattaaaatacagaacagaaaaaaatgactttcagatctctctctagtccaattctcttattttataaataaggaaacgaggcatagagagaataggctttgccatctcacacattagtaacagagatgtgacagcattgaggacttctgagtgggttgctactgtcctttgtattatactattgttcctcttttgtcaaaaattggtttagaaaattccatatcttccttctttaaaactgaacaatggcattaatacatactttctgtggcgaaaaggagtttatcttttccagtggagagttgagttttacagtctttcctgaatcaacttttgcatccaaattgtgtacttctgttccaaagcaatgacgttttctaatctgtaaacacagaaccaaaatgaagtttaaggtgaactagaagtttaactggctagttgttctcaaaggccaaaacagctctatgtatttttttcctgcatccaaaaaaagactatttctaacaggcaataataaaagaaattttaaaaatgcaaataagcacctcattacaacacttaaaggaaatagaacatagtagtgactcatgaatcttagccaaactatctttaattagtgatgtatcaaaattagagtattgtaaaatgaacttctcataaaatagtcccatcatatggacatcaaatatagcaatattggaaagtccaatcttatatctaattggaaaataaaagtaaatcaaaatttaagcataattctacattgaaaagaactcagaataaaacttttaatgtaaacagtcatgatttcctacaggatggaataaattactcgattactattatcactgttacttactagatatttgataaaccaagttgcctttgattaaatttcttttataaataccactaagttttctttccaaactgtatccatgcttttcctatttgtgaaaaatctattcactatataattggggagaaaagcatttctattgataatctcattcccgccaaaaatgaaatgagaaccagtgaagtgagggaataaatgttttatgttgagccctacctgatgacatgcaaatctatgaatacattttgtcggggggaaatctctataggttcacacctcatttgtcattggtactttgataaaataaactagttcattctatttctaaaaacaaggctgaattatagaaatttataaagactgtaagtggaacagttaaactacataagacttcaagaaccttgagtatactcaattaaaagtacccagttacttacctacaaataacatcctaattaataatttttttattttatgtttttatttatttattttttagagacagggtcttgctctgtcaccaaggttgaagcataattgcatgatcttagctcaccacagccttcaactcctaggcttgagcaatcctcctatctcagcctcccaagtagctggaaagtagtctgtagggctacatgtctgatgagcctgtagggctcatgccaccacacccggtctttttttttacttttttgtggagacaggagccttgctatgtcacccaggctggtctcaaactgctggactcaagagatcctcccacctcagcctcccagagtgctgggattacagtcgtgagccactgtattcagcctaataattatcttttttatttgtaactaaatctattaaaatcccagccttcctatctcactgccatgaattctgagaaaatattgtgttcatctgcatccaaatttcatttaaaatatctggtaattcaagccttttagtaatttttagaaataaatatacatattttatcatgtatcaatcttaaaaactcagtaagaatacatcttgtcattacattaaaactatcaattccaaaatatccataacatgaataatcatatcaaaggtattttagccaaaaggaaatgctattttaagataaaaacaatggaggagttaaaaagtacaaagtagtatatcactaagatatgccttaagtaaatattttactatcaaattcctcatatataagaaacaccatgcagtttcacttgaacgacatgttactgtgaataatctgctataataaactcctttgtaacaagtaactctacaaaatgaaattacaacaaattattaatttatggctgtcacatgacccaactaatctccacaagtgcattaaaaacatgatacttgactaccatgttcagctgtaactaactgggttatttactgccaataaactctgtttacctgctgtgtagtttctaagggtcgaattcttttcttctctacttgaaaatcatcattttcatctctgtatatggatgcctgtttcttagcagataactttgcagccagagtggttttttcaggggagtcttatataagtaatttaaaaaaaacagcataaataacttacaggtaggcaatttttctagaagaaaactggaaccaggatgtaaggcttatttctagaaatttcataccataatctaaaacatgaaacttaaacatgtttaaaaagtacttctctaccattcagtttactttaccaaagattctgagaaacatgctttcaataggaaaagtccaatttgattttttaaatcgccttatgtacttgtagactactcccaataacatgatttaaaatgtataactgcaaggatctctgaagaaaatatatttcatgtctgtaaaaatctttctttacagtatcaacgtttcttccctactaagtttctccacgttctttagagcaaaaccattgattatagaatcaagctcatataatctgtcttttaatcccataatcctgaaagctccttctcaaggtcatccaggacctcttaatcaccaaataacattaattatcccaatcttacaaatgtgaacactaggtttttaaaagtctagtagcttgcccagtatcatacagttattaaatggtagagcctagacatgactgaatcctgctgtgtgactccaacatccatacatgtaacctcttaggcatacagccaacactgtcttcttggaacacagcaaacacattttcttcttccttaatgtctgtaacactgctcttaactattctcatacattggtttctcccttttcctaaatataaatattcttaaaggtaccctccttcctctttgcttctctctaagcattctctccactcccatggcttgaattaatttaacaatcttttttaaccatctttttttttttttttgagatggagttttcctcttgttgcccaggctgaagtgcaatggtgtgatctcagctcaccacaacctctacctcccaggttcaagcgattctcctgcctcagcctcctgagtagctgggattacaggcatgtgccaccacgcctggctaattttgtatttttaatagagacggggtttctccatgttggtcaggctggtctcgaactcctgacctcaggtgatccacccgcctagcctcccaaagtgctgggattacaggcgtgagccaccgtgcccagccaacaatcatttattacactgagtctaacccatggccagacaccatggaaaaacagtgaaaaagagaatccttggccctaaaggatttacagcagagaaagacctacatgagcaggtccaatactgttttcaaaacacaaatttgaggccggccccagtggctcacgcctttaatcccagcactttggaaggccgaggcgagtggatcacttgagcccaggagttcaagacctgcctgggcaacatggcgaaatcccatctctattaaaaatacgaaaattagctgtgcatgttggtgcaggcctataatcccagctactcgggaggttgaggcatgagaatctcttgaacctgggaggcagaggttgcagtgagctgagatcgcgccatgcactccagcctgggcaacagaacaagactctatgtctccaaaaaaaaaagaaagcttgagattacataaactcagaaatgaacctatgccacatagcactgattttcaagttttttctaaagtgtaggaatattttcttcttaaagaaatgttgcagctgggcacggtggctcacacctgtaatcccagcactttgggaggccgaggcaggtggatcacctgaggccaggagtttgagaccagcctggccaacgtgacgaaagcccatctctactaaaaatacaaaaattagctgggcatggtggtgcatgcctgtaatcccagctacttgggaggctgaggcaggagaatcacttgaacccgggaggcagaggttgcagtgagccaagatcgcaccactgcactccagcctaggtgacagaacgagactccatctcaaaaaaagaaaaaaaaagaaatgttgcttaaaatttccaaaatagggatgaaagacccagaacttccctgatccactttcccccttcccttatgagtcatgtttctttctttataaggttcttagaaacacagtttgaaaaccactatactctaaaaatcctaatagttttgcctatcagaagtaggtctttaatctaccttgaatgggcttttgtatatggtataaagtagggctccaatttcaattttttccatatggacatctaacaggcctagcaccacccaagttcttcctttcccctacaagctgtaggggcacttctataaaaatatcaagtttctggatacatgtgggaccaaattagggttctctatacttttatatgagtctatcactgtgctaacctcagtctgtcttaattactctatatttacacacaataaatccgtatatttggtggatcaaatctctcaccttgacctgcttcttcaaaagcatcctggctatccttagtcctttgcatttccatatatattttagataagataggtaattttgagctctgcatgtccaggcaaccagtaaaataaccacaaaataaacctagatcagtgattctcaaccaggccaattttaacaccaccacttctcatcccaggcatactgggcaatgtctggagacatttttcgttgtcacaaaaagagcagaggtggaaatactactagcatccagtgcataaaggccagaagtattgctaaacatctcacaagggagagctcctacaacaaagagttatcccactcaaaatgttaatagtgccactgtggagaaactctgtcccaaataaatacggggcaaactgacatgggcctattaagagggtagggaatgtccacccaaaatgatcatttagttttagaaaactgaactgccatgtgccaaataagggtaaccccaattcataaaaataaaaatcatattatcatcacatacaaaaaggcttatcttcctggtcttgatagcaagggagtttgaaggaagttcatcaaaggggtaaaatctttaagatacaaagttaaaaagaaagaagatatctcccgattatgtttttttaaaatcttcaagaaacctaagaaatacccaatagaaaaatggaggctgggcacggtggctcacacttgtaattcaagcactttgggaggctgaggcgagtgatcatttgaggtcaggagttagagatcagcctggccaacatggtgaaaccccatttctactaaaaatacaaaaatcagccgggcgtggtggcaggtgcctgtaatcccagctactcaggaggttgaagcaggagaattgcttgagcctgggagctggccagtgcagtgagttgagatcgcaccactgcactctagcctgagcgacagagtgagaccccacctcaaataaaaaacaaaagaaaaatggcaaacaacttgattaggcaattcactaaagagggtatccaaatgaccaataaacatatgaagtcaccagagaaatactaactaaaacccaatgagaataccacacatacacaagaatgactaactttttttttaaactataaatatcaagtactaacaaaaatggtgaacaactttcatatactgctgcaggggttggagggatctgaccggggacgcataaattgattcaaccactttagaaaatgttgtcagtatctactatagctgaacatatgtatatactatgaccaggtatgtgtctacagacaatacttacctatttgcaccctttgaacaagaatgttcataacagcactattaaacaatactgaaaacaacccaatgcctaacaactgtagaacagattaataaactgtggtatattcatacaaggaaataatacacagaaacaagaagtactactatatgcaacagcatgaatgaatctcacaaatacaatattaagcagaagacagacacaagattacatatataattccattttttttttttgagatggagtttcactctatttctgtaaaaaggcaaaactcatcaatggtcacaggaggacaagaattacctatggaaagaagggacagtgactgaaaaagaagatgaggagggcctctggggtgttggtaatgtctctctcttttttttttaatctatgtagtagttatgacagtgaaaattcatcaagttatatacttaggatttgcatttttctatatttaggttacagattaaaggatttacttacaaatataaagagcgtatcagaatacaaccttgatttttcccatttagactattctaaataacactgactcacagtaatgtcaaaatcaagttgtgtacatatggataactcattgttgataaagacacaaaggcaatgtagtggataaaggatagccttttcgatatatccaggtgctgaacaactggatatccacatgcaaaaaaatgaacttgaatccataccttacaccatatacacatattaactcaaaatggatcttagacctaaatgtaaacctaaaattctatctgatcaaagacttgtattcaaaatgtttaaagaagtctcaaaatttaacagtaagaacacaaactaataaaaaataggcaattattcgaacagacatatcatcaaacaagatacatggatagctaataagaacatgaaaatatgggaaataaaaattaaaaccacaatgagatactgccacatgcctattagagtagctaaaattaaggccaggtatggtggctcatgcctataatcccagtgctttgggaggccgaagaaggcagatcacttgagcccaggggttcaagacaagcctggggaacacagtaaaaccaacaaaaactataaaaattagctaggtgtggtggtgcatgccagtagtctcaactactagggagtgtgaagtgtgaggatcacttggttccaggaggcaggggttgcaatgagccaagtgagccaagatcacagtactgtacccagcctgggcaacagaatgaaaccctatctccaggaaaaaagaatggctaaaattaaaaggactgaccataccaagggttcacaaggatgtgaagaaactggaactctcataactgctgatgggaatataaaatggtatgaccacttcatgaaacagtttagaaatttcttaaaaagttggccaggcacggtggctcacgcctgtaatcctaacactttgtgaggcacagatgggtggatcacttgacgtcaggagctacagagcagcctgaccaacgtggtgaaaccccatctctactaaaaatacaaaaattagccaggtgtggtggcacattcctgtaatcctagctacttgggaggctgaggcaggagaatcacttgaacccgagaggcagaggttgcagtgagctgagattgcgccactgcactccagcctgggcaagagtgactccgtctcaaaaaaaaaaaaaaaaaaaaaagttaaaacatacacacctacaaagcaatctggtcattctgctcctagtattcacccaagagaaatgaaaacatacatccatacaaagatgtagacacaaatgttcacagtatctgtctttgtaatagcccagaactagcaataacccaaatatacataaacagccaataaccaatttgtggtatatccatgcacaattactcagaaataaaaagaaacaaactattaatacatgcaacaacatagaggaatctcaaaataattgtcataagtgaaagaagccagacaaaataagtatacatcctgtatgaatccatttatataaactatagaaaatgcaaactaatctatagtaacaaaaatcagacaggtggttggttggggaggtgagtcatgtaggggtgggaaagagggataacaaaagtccatgagaaaactttttgggaaagtgagcatgtttaaaaagttttggataaagtgaatatggggttggtgtgtatgttcactgtcttgattctggtgaaagtttcatggaggtacatatgtcaaaatgtatcaaagtgtaccatttaggctgggcgtggtcgctcacgcctataatcccaggactctgggaggccgaggcaggtgagtaacttgaggtcaggagttcgagaccagcctggccaacatggtaaaatcctgtccctactaaaaatacaaaaaattagctgggtgtggtggcaggcgcctgtcatcccaattacttgggaggctgaggcaggataattgctcgaacccaggaggtgaaggttgcagtgggccaaggtcacaccactgcactccagcctgggcaacagagtgagattctgtctcaaaaaaaaaaaaaaaaaaagtaccatttaaatatatgcaatttgttatgtcaagtaaacgtcaataaagctgtttttaaaaggttgtatataaatattatacaccagaattcctataattagctgaaaattaatcccattcattcctaacaacaaatatttatctagcacctaccatatgccaggcaccctgctagagttctagggatacaatggtaagcaaattgacaatattcctaacctcatgaagtagtctgccaaggaagcagagattaataaaagatttagacagacacatataatacaaactgtaacaagtgctataaaggaaaggtacacaaggagaagacagactataataggaaaatcaaatctactctgacagaaaaatcagtgatggataccccaaggaagtcacatgtaaactgaggaagaaaaggataataaattgaagatggaactttgctcagaagagacactaatagaagcaaaggctctgaggaaggagaaagcataaatctttgaaggaaagggaagaaatccaaaaggccaaaatcaaaacaatgtagacaacactattggtcacctatttaataactgttccacttctctttcctcattcctaccagaagttcaatcatctaccctcctctatatagtcacatgctttagaggaagctgactccatccttgattttaggaaatggatactctttgttttgacttaagtcaatcatggcaacctctgtctccctgccagtgactggtaaaggaatagcatgagtaaaagcagaaaaaagcgttattggatgctctaaacaagaaatggtagtttggactatggaggtaccaatggatatggagatgtacatgaagaaataagaaagagcaaagtgtccaggatgttccctaggtttcttaggtaaataatagtctatcctttctatacagccaaaagcaggtgaaatattttttaaatatattattaataatcttatgttactcttaatgtatttctctaaaattagtaaaaattatttaaagatcacacataaacatacctgatacttatgtaggatactggcctcagaaggccaggcaaacttatcaagaatgaatcaatgaggctaattagatttcgtcttaggatacaaacattgttttatagaattctaacatataattaacaataatggctacaaataacatcaattttggaaaatcatttattttgccttgccttccttaaaaaattatttaggacaacaaaatgtctcaataaattaaaagtcaaaccaagaatttaaaaacgtctatggatttttgaccactctgtgctattttaaaatcattccagagaaactagatagagatatataatcagttatgctaaccaaacttatataaattagggcttataacagtaataattaagactcttattacagatatcaactgacccaggcaaaatataaattaccttgacaagttgatgaagtgccatttctttcagaaggtggtgtgcttggatagttgaaatgacgtgaagttccttggttcatgtcattgtttgtaaaatcctttgaatggcatgcacaacaacatgacaattgtacttcagctttttcacttacgccctcatctgctggtttccctaaaaatgaaagaacatctatttataatatatctaattaaataaacatcaatcattctctacagcccagttcacccaggattgggaggtttcctaagataaaagatttttagggctaacaccaggaaggtacctggcaaacctggacaagctggtcactttatctgcagcatcaaattaggacaggagagaaataagccaaaaacatttggttggacacagtggctcacgcctgttatcctagcactttgggaggccgaggcaggcacatcaattgaagtcaggagtttgagaccagcctggccaatatggtaaaaccctgtctctactaaaaatacaaaaattagccaggcgtggtagtgcacgcctgtaataccacctactcaggaggctgaggcaggagaatcgcttgaacctgggaggcagaggtagcaatgagcagaggtcatgccactgcactccagcctaggcgacagagcaagactctgtttcaaaaaccaaaacaaaaacatttatagggaaattatcacccatttatgtaatctgtaaaaatctaataatctaagattaataatgtaataaaagtacaactactcaagtattcatttatattaagatttatctaaaattcaagaatggattgaaacaaggacataaagtatatccttaattactactctttccctaaatgaagaatttgaaagttcaatatattagataataatctaacacataagggttaaatcattcccccaattatacttctatttcaaatagaaacatgttttttgatgtattaattctgatacttgcatcaaaatacattttaaggtcaatattcaaatcaataaaataggtaattttagtgctaaatataataccaaattgtaataagtttacattgtgtgcctacattgtatacaaatgtacaattcatatacccccaaaaaagctaaataatttatttttaaaaataatcagtattgacattgttttcccatttgtaccatataaatattcctaattctattttccagacatctgccattaagacctgaagttagtaccgataaactcatttttcccaaaattaacgtcagtgagaatcaaaatgaacaaccaaaagcttatgaagtatttactgtttttttttttttttgagacagagtttcgctcctgttgcccaggctgaagtgcaatggcgcgatctcggctcactgcaacctccacctcccaggttcaagtgattctcctgtctcagcctctcgagtagctgggattacaggcacacgccacctcaccaggctaattttgtatttttagtagagacggggtttctccacgttggtctggctggtctcaaacttccaacctcaggtgatccacctgccttggcctcccaaagtgctgggattacaggcgtgcgccactgtgcccagccttaatatactcttattagtaacaaacatttcattttaaaaatgtatctatatacctatatacacatacatacatacatacacataccatgtttaacctcaattctcctaatactttaggttaaagccatctaatgtaactaaaatgtatccaatattatatttctgattcattatgtagtttatatagtctttcatagaagtaaatattaataggcatttgttagcaaacaaagtaaaaatagtttggcctggtggctcatgcctataatcccaactatttaagaggctgaagcaggagaatcacttgagcctgggagtttgaggttacagtgagctatgatcacatcactatgctccatcccaggtgacgccactcaaaaaaaaaaaaaaaaaaaggaaaagtagtgggaagtaatataaattcatacaaacaatattatactaaatttctgtttatctggcatttaaacaagtagaaagatcaactagaatgtattcttttttatatattccatgtgctgatgttatgagaaaggaacaggtaagcaaatatattaaaggatttccccccccaaaaaaagcaattagtatgtgttacagcatcatgacagcccatctcttgcatcttttacatacaaattatcatctaattatttttataataactctaagcatccaaaactttgtttgtttgttttctttcacccaggctggagtgcacaatcacagctctctgcaacctcgacctcctgggctcaagcgatcctaccacctcagtctcccaagtagctgggactacaagtgtacatcaccatgcctggctaattgattgtcaatttttgtagagatggggtatcaccatgctgcccaggctgccaagtctttatgtactttccgactcatcaaaagactaaattatgttcaatactattttagcattaattaaacatattttgctatattgaaactcttttggaagatttataacttatttcaaagaaacatctttaaacaaatatttaagttagcgacagcatggctgaaccagtctggataaagaatactgtattatattttctcagatcccagtaagtaacctgaagatatcaagcaactacttaccactaagagattgttgccatgctaaagcagaacaaagtaaggctaagctttttccacttcctgtgggactctccaacaaacaatgttgcttgctgtttaatcctctgagaatctatgaacacagaaaccaatgaaaataataaacatattaactttataaaggtctctctccatctgaagtttaaatagaacagcaaggaaaagtgagattgcactccagggaacacaacaatagcagaaggaactcatatttagttaaatccaaactgtattcctttacacctctccctaagattatcttactaaaatatcaagcacaagagaagaaatgaaaagaggaatctgtgccagaattatgcaagcatcaatgatttctgtaaaaccagaatacattactacctatcaatatatttgatgaaaacttaatgaaggatactgctagtgagagtacaaattgttacaactacttggtagagaaataaacaatttcttataaagtgaagatgcccagctccagcaagtccagttctatgtgtacacccaaaacctttcccacatgaacacaaggaaacatgcataagaaagttcacagcagcagccacgcttgtaatcccatcactttgggaggccaaggcaggtggatcatttgaggtcaggagttcgagaccagcctggccaacacggtgaaaacccgtctctactaaaaatccaaaaattagctgggcgtggtggcgcatccctgtaatcccagctactggggaggctgaggcaggagaatagcttcagcctgggaggcaggggttgcagtgagccaagatcgcgccactgcactccaatctgggcgacagagtgagacgctgtctcaaaaacaaaaagaaaaaaggaagttcacagcagcattgtttgtaactgcaaaagaatgtaaacaacctaaatgtctaccaataagaaaatggacagataaattctggtatattcatccaatggaatttatacaacaattaaaatggattaagaatcaacagggctatacattaaaaataatgctaagttaaaaaactcaagttctgcataaaaagtaaggtaccgtatcacatcaatgcacagtttcaaatatgtaaaataatattctatattgtttatggatacatatatatgtaataaaagtataaaaacatggctaggaaaggaaaagaacaaattcaggatactaataatcttgttaccagtaaataagatatgaagtacatatggcaaaatagctgtaacaaaactggaaagctggtttactcaaatttgtatattaattttctacatgatccaaacaaaacaatggtgagaaaaatagtattctgtgtaaaagatagtaaatactctgtttttacttaaaagtatagcagtttttcattaaaagtatagaaattccaaatgagctgagaacatttttcagaatgttcttctttgccttaaccacagatatatacagtttagctgcaatcagtagtttcccagaggttagatattcttccaagtgaacccagaaaatattctccatttactgagaatatgaatgcagtcaaatactcaatgtactttatgggtcataagtatctatatcttaataaaaacttaactgctgaaaaatacttacagaattcatcatagcaagctgtgacgggtaagctttataaggaaagtaaatcttcaccccaccaattgtatattcagaccacattgaagacatagtgctttcctgtttatttcagattcctaactacaacagaaatgaaaatgtcaaatattgagacacgccttacaaagaaaaccagagaaccaaaactaagggagaaatctggaaacagaaactggaattaataaaagtataaacaaaacaaatggaaacaaaataatttcctagtcttataaatcacagcggtcaagagcatgtcttagagtctaacaaatctagatttgtatccttcactctgccaggtattagttgtgtgacttcgggaaagttagttaccttctctaagccacagtgactgcatgtaccccataggattgtggtaatgattaagtgaaataatgtgcaaatatgataaagtacataccagattaaacatgagctcttgtaacagttagatcagatgtaatcaacctacagaaacaaataagttcctgaggcctctctctctacaactccgtagcatcactctttctccagttcttcccctttgtgttacccctttctgcagtcctccagttagaagaaaaaagctgttgaccagaagtcaggaagcataggttctataccaggttttggtatactgcctggtatgttatctttgactcaggtatgttatctttgacatatctttttacttctctagtctaagatccttacctgtgataacccctaatttaatttaaaggctgttataagaaagagaatgccttggcacatagtaggcactcaaaaatgttatttgaagatcagtagagtattatagaaacaggatgggctttggagtaaggcaatcctaagtttgaattccactgtgtgaatcacttaacttctcagagcttgtttctccatatatggaattgaaatactactacttacctgacagggtttttatgaaaattagccagggcagaatgtacctaacccaggatctgatacagatgaggatcactttaatcctcacctcttctaaaccacttttcttaacctaggatccacggatgtaattcagagacaatgacctcttgaaattgcaagcataagtttctgtacatgattgcatttttctgaagaaaaagtccatagatttctcttcccgtaaatatatctcaaggaaatcaaaatagcgggggaaattacatgcactgttattaaataaggaattatttgcagtcgtgggaaaaaattgtaaattcaacctggggacgaagagatggttaaaatagcaattcaatagattatgaagccaataataacattcaccactgcttgtgtgctccaaaagaagaaccattattctagggtattttccagctctaacattttgcgattctatctgtaaagctctgagaatgaggtatggtggaatctaacctcttaatatgaatcaacaactcaacgctggcctagttactcagatataatctagaaatcagcccgtcctgtaccccggctgtggcaacaatagtgtcaaaatggggtagcttcccccaaacattgcataaaggataaacacacccctctgcctcccgccaagaattaacgcagcgcccgggctaagaacaggcctgcgctcaaaggaggtaaggataggctccctcctcaggttttctgccccgtatctccctcctcccccagccagttgagatccccgagaccctggtgatccagtcaccacccatgggcccgcaggctgtgcagaagaactcaagccctttccgtggacttccctccgacttgcctgtctggagggaaaccgaagcaacgctctgagctccgattcactgaagaaaaggaaaggaaaccgacttctgagagcaaataaagcggagccctggaagagaagaaagggcacgagcccttcctcctccctcttcctgggggtgctgctacttccccggccttgtgtgcaggactggggccgccgttacctttcctcgacccaccagacccctcaaccacacaacccgagacgaattcccgcctcccgccccctcgactcccagcgcccaatagcccagcgagctcgaccaatcacccgccaaggccaggaatcaaccagtcccggtgcgaggtgagggggcgagaacttcggcatccaatggaagtctccgaaaaaaaaaaaaaaaaacaagggctcaaggtacgcggcggaaggttgtcgccactccagcaaatccctagtgtttgtttaaagtagaaagtcgtctcagtttgacttttgaaaccggcgatagagtctatgcagcaaattccttggaaactggaagtctcattcttcacgtccgtagaccagcggaaaggaagtatctttaagctttgccaagttctttgagcatttatcagtgccactcaatttaaattacccagctttgcagtagccaggatagcgaagactcaggcgggaattgccagactgctgagccaaacttaagtaagaaggctctgtgacatcgggctacaatctatctttcataatattcaaggctttcccggatgctaaaataagccagagacaagctctcagggtctccagtatcagatcacttctacttccattaaggcttatccgccttccatccctcctaagaccagtttattatttgccagtagtactttaatttactcaaagaaaaggaggttcatcatgatcttgccaaatcatgttatttttttaaaaaatctgtataacctaaacttggctcaaataataatgtctccaaaaggcaaaacctcatactgtttctcaaattcaagtaactagtttggggaaggagtttgctgggaagaaagagcaggagggggctagttgatttgtttgcctcattgtcaattgtgatatatcttaccaaaaatgacaaaacttgtagtcataaaaataaactctaccctttgacctagtaatctgagctccagatatttatcctaaagacgtaatctaaacgaaagaaaatgtgataccgcaattgacaataatatctattggtaatactgaaaaaaattatgaacttcccagtctagtaatatggaggtggttatgacagatgaattcaatacattatgaagccaataaacttataaaaattaaacttgcaagaaaaaatcccatataaggttaagtgaaaaaaggcaaagcaaaccccaaactgggtgttagggattcagtaatgtgaaaatacatatgaatgagcaaagatgaagtaatttactgttaagacaatgaaaggaaggataatgtttaaaaataaatccttaaaaataccttcaaattgtcatttctcttttataatttttaaaacatcaactcttggccgggcgcagtggctcacgcctgtaatcccagcactttgggaggccgaggcaggcggatcaccaggtcaggagaccaagaccatcctggctaacacggtgaaaccccgtctctactaaaaatacaaaaaattagccgggcgtggtggcgggcgcctgtagtcccagctactcgggagactgaggcaggagaatggcgtgaacccaggaggcggagcttgcagtgagccgagatggcgccactgcactccagcctgggagacagagcgagactccgtctcaaaaaaaaaaaaaatcaactcttttgagtaactgctctagtataactactctcattttcctctcctaaattactaagagtttcaactggctctcaccttgcattgccatttaatgtatgtggcataacagaaagggatacacgtaggccctggagccatacagacctcgaatacagtcccttgaaccgttcccttcaggttaactctagtggaatgaaacacaaaaactacaggttcgtttgataaagaatatgaatgtttataaaccaatattcaaaatagctgcacacatctgttttcacttgaataaaaaaacacattgtgacaaattttataaccttaacttaaaatacatgaatattaacatttactaatatatttacacattttatttacatcatcaacaaatctgatgaaaaagagcatatgtgattattttaacacagcaggttatgaccagtctttgaatattgatccaggaatgtgcactgcatttaattagaaaacatacttttaactttttctgaactcctagggcatatctattcacacaaaatatcgcaaggcctcagtttaaaaaaaaaaggagcagttgtatttaatcttaagggactacaaaactgccttgtttaaaaatatgaaaattcttatgctatttttaagatacttttattacttttatttttcacatcaaaattacttaattgaacattaagcatctaataaaaagttataaatattctatcacatgtgatactatgcacttcatgatttgaaacagctacaaactcattctcatagaatatgaggtagggccagtagtaaccccattttacaaaggaagaaaatgagatgtgactatttactagtgaaaaggctaaagttaaatttcatttctcaaaaactacaccttcttattagcctaatttcttttacaagtgaagcggtctggccaggtgcggtggctcacacctgtaatcccagcactttgggaggccaaggtgggcagatcacctgaggccaggagttcaaaaccagtctgggcaacatggcaaacccccgtctttactaaaaatacaaaaatacaggtggcgcgtgcctgcagtcccagctactcaggaggttgaggcacgagaatcccttgaacccaggtggcagaagttgcagtgagccaagatcatcccactgcactccagcctgggcaacaggggaagactccacctcaggaaaaaaaaaaaaaaaacacaagtgaagaggtctgtttcaagtgggggtggggaagtgtgtgattgaggtatatctcagagagaaaaaagggaattactttctacattgataatttttttttaatgattagggtttacctgaatatgtctgcctaatcaatggaagttactgacagaggactgcaaaatccttcggcaagacaatattttctacactttaacttttcctcaggttcaaacactgcattttcttactcaaagatcttctcaaagtaagatatgaattataatcctgatgacaaaccaagagctctttaatccagtgggttttattgctctaccttcatttaatttgatacatatttcccccctctgagcattaggtaagttaataaagcattataaaaataaatttaaaacataaaactaaatgagatctctcaggttcttctttgaacaaagatgtttctgtaaacacttttacaccagtatcttaaaattccaaattattcaagtatctctttaaacatatggcttcatatattaataaaaattgaagcaaatatgtgaaatctttaaatcctcatctgtatttccacagaaatcatttacaaaagctacttgcctttttaaaagtcttctcaatactctttcttgagaactagaattccaacttgcattactattacttgcactgcaaatctttgagatttctacttgtgtttttaactcctattatttccttaattctcctttccctttacccttttttcctctcccatctttgcatctttgtcacattctgttacaagctcacagttaaaataaacactagggctacccacagactcatttttataagaaattaaaggcatggcagtcttcacttcaaaagctaaatacaaggccaaattccctttccaataatgagtttcttacatgtgttcccagtggaaaaaaaaaaagctcagctgctacaatagaaacatatcagcaaagtagatccaaagatgtgccaatcagaaacaagcaagcataattctcataaagttctaaactatactcatgttgaattgaattgttttagtgattccaagacaatactttactgttcccattcagtttagagttgttactaatatgcagattcatgttgggtatatgcagcaaacaactttttgttgttttaaattttgttttaaattccactaacactcatatttattatttcaattactgttctttcaatacagtgacagagctgtacatcaggatccatgcttccagtgtccctggatccatttttataagatgaatctttacagatttgagaccatccacttggtttctcctttatttgttgaagacctacaacataagggaaaaaaaacattaaggccaagaaatttggaaaggaatttggcctttttgtttgagatattaagataacccttgaaaataagttaccacttacgtgtaataattggatcaatgtctcttgtctgagtggcaacatcagaggcacaaacttgccctatttggatcagcaaagacataatatcctcatacaatggaggaaatgctcgacaaaaagagaccaaacttggcagagttggcataaaaaaagcataccgcttagcctgtgttaaaactgttggaaaaaaatgaaacaatattttagtttacaaatataaattcaacacagcttacacaacatactaaggggaactatgctctgtgctggagatatgaagttctctaaacacagccaacccgtcttcagaaagctcacaatctagtagtctcagtctttatccaagatacaaattattatgcacaagttttgcaataagtacattacatgcattatttcattgaattcctacaatcttatgaatgaccaaagtactattatgacactcattttatatatgagaaaactcttaaaaaaaggttagagaggttaagaaacttgttaaagatcacaagccagttagtggtggggctgagattgaattcaggcagtgtaaactcttaatcactacaaataattataacaggatataaatacgatgaaaagaaaaacaacagggtattatggaaatattataatgagaaagaatactaagttaactatgccattacattaagggttgcattatagttcatatattttaaagtagtttattttcagaccattttattctacaaaccagaaggtggttaaaatatcagaatatgttttagaacttatgaagacatctaatacatttatctttcatttatacatatgatgatatttttctggaactctgagcatttgtaataaatgaacatttgttatctactgatacaattacattctgaaagtgtatttgttttccatttataaaatacagaaagcttatatttacaaatctatatatactcattcacaaaatgaaaaatacaatttgcctacctattcattcccactacactataaatcacatttgtaaacagaagtttccaaaagaagaattcaaaagacggcataagttaaactagtatttaacacatattgtatcatactgtctcagagtgacagaaaaaacatattgcatcactaaatgcagaaaatataggaactataataatttatgtcagatgtttgttgatgttgattggctacatacctgttaacaaagttcccatgacattgacagctaaacgagccacactaagtgactttggtaatgcatattgtatacacaagtgagaaagcaactggatagcaaatatctgcaatacaaaatccagttattacatgtttctcaagaatatctttaggtattaaaaattataaaatgttttgtataactagtaagactggagagagagatcaattgtcctaaagctccaaaatgctcattacctgtttctcaagttctggctgtgcaataagctcaggtatgaaatctagacagatgtgcatagatggaatacctgcgaccgtcagaggcaaaagttcacatggataaccctatctcaacaagaaacgggaaaaaagtcagaaataaaataactataaaagtacagataaaaatacaaatgaaagatttcatttcctttctgtaaaaattgctcagaaggctatagtgccccatatgtaacctggcatttcacttttctgatgcactagaatagagattaaactatcgaacatttcattaggttaaaaaaaaaaacaactaaaaatctggatttttctccatattgcaaaagcccatggatcatttgtgttttctctggtttctaaatgatccctgttaatatagtattcaaagcccccaagaaaaataaagttcaaacacaaagcatcattctttggaaacagacctgaaagtgaacaagcttagcaatgttgggatctgcaatgtacatttggtgcaagagacaacagataaggcactgaacttctcgaaggttacagagcaaattgtcttctccttcctccattcccttatttggagcgctggtggtaataacactttgaacatttcttaacaagctatctggattgacaccatttgctttctcctcttcagtaggtaggcaaatctctaagagaatctggacagctgcactatcctataagcaaacaaaacatagaaaaagtaagaagtttctaagaagttaaaaaacaaatcagattttattttcacatgaacagatatgataaaataactaatttcttaaacacacatacacaaagaggtacttctaagagcagaactgagcaatctgtagagcagtggttctcacctttttaggattatgaaccccttaagaatctaaagaaaactatgtaccctctcccgataaaaattaacatacataaacaaacatcattacataatgatatcacatatctctaaaatagatccatggactccagtttaagaatatctactagaagagtatcatgaattcagttacatccaaaacaggccctaggcaaaaatgacttctaccagaatgtcctttccttcctcttaatctcctacttttcccagtatgctatcctgatttccctttttttcaacctgtttaaggctctggtttcacaaggaaagagtctaccttaccatccattccacctgcacaactcattgctcagtctacaggcttgagcatcattgcacagagcagtagcttgaggggtaatggcaatatatttgaggcccctatatataaaggagagctaaaatcactctcatctagcagaaagaagtaaaaaataaaaatgaatacatgacatccacctctgatagacagctactgcctaaggtagagaaaacaattacttgagctaagtgattaagaacttattataaagtgaggttagactactttataatcatggttcttggggaaaggagtttttggttattgttattgttattgttttgttttcttttgttgttgttgactcaggagccagagtgcctaggagtgaatcctggttctgacatttactaaatgtgtaaccatgagcaagtcacttaacttctctgggtcacattttcctactctgtaaaaatggagataatactctatacctcataggtaggttataaaaattaaatgagctaatatatttaaagaacttaggctagcacctaccatatggtaagcactacacagatgttagcttttatgatcttcaatcccttatctgaaactcctaggaacagatttattttattgatttattttattgatttttgttgttgttgttgagatggagtctcgctctgtcgcccaggctgtagtgcagaggcacgatctcagctcactgcaacctccgcctcccgggttcaagccattctcctgcctcagcctcccaagtagctgggactacaggtttgggccaccacgcccggctaatttttgtatttttagtagagatggggtttcaccatgttggccaggctggtctcaaaactcctgaactcaggtgatccacccacctcagccacccaaagtgctgggattataggcatgagcaaccatgcctggccaaaaaacttttctaaatataaagttgaactgcttatattgtcatggtatttatcactgcctgacattttattatacatgcagttgtttttctgttgtctgtctccataatttgacatttgatcttaagaaacaaataactaaggattttgtcttcttcaccactctatccccagttcctggaacaatacttggcacacagtaggtgtcccagtaaatattggttgaatgaggccgggtgccgtggctcatgcctgtaatcccagcactttgggaagctgaggtgggtggatcacctcaagttaggagttcaacacaagcctggcaaacacagcaaaaccctgtctctactaaaaatacaaaaattagccaggtgtggtggcatgtgcctgtagtcccagctactcaggaggctgaggcaggagaactgcttgaacccgggaggcggatgttgccatgagccaagattacacctctgcactccagcctgggtgacagggcgaaactctgtctcaaaaaacaaaaaaaacaaaaaaaatgtgccgaatgaataaacatgtaactctaaactcagaataggtaaacacttaaattttattaaaatataaatcttatttaaatggctatttcattcatatcatgaagattattcctgatttcagaaatacaacatatctgatactcagaagcaaaggtaacatcattgtaatagattctataataaaagaaatgcacaatatgtcaccaatgtacatggagcgcacaatgtgccatctattgaactgattatactagtagagaagcccttgctctttttgactaaattttactttagcaaaatttacctgagcggccagtaatgcatttttcaattcttccctggtaacttccggagcatcagtttgtccaactaaaccaattgtattattctgggaaggcctatcttgctctgtttccttcagatgagcactaaggtaggctttagatgcaagaagatatccattcaacatgtgtagggtaatatccatcagtggggggcatctaaacaaggaaagcagaaaagaaaaatatatcagaaagaatataaatttataaattagccagaacatgatcaatttagtttaaatgctgagaaaaacctgagtagtacatactaacttttcccactaaaatattcattctcaaaagtttaatatatgtttcttattctctgtatttcaagcccttatataaatagtattacttgtttcatcttatcagctaaagtcaaatatgtataatgtaaattctaaagaaaagatgaccgggtgcgggcaaaacaatattgcatgaagaaaaactgtaatacacgtacaaaaagctgatatcctttatagataaagagctctttaagtcaataaaaaatataggctaaaatataaagatgaaataaatggccagtaaatactgttaaatgtccagtctaataagaatataaattaaaatgggaatctattttcacctatcaaattggaaaacattatatcaaatagtgcaggaaagtatatactatcaaacactgctatggaatgtaaaccagttcagcctttctacatagtagaatgaaaatctgaattaaaagtcttgaaaatgagcacgacacttttgccccaataattccattttcccatgttctaatgaaatactcagcatggggaaatgcacataatcaccaaagcactattgataaaagcaaaaagtagaaataaaatatcctaggggattgggttaagcatagctctataaaatggaataccatatagccaattaagataagaatataaactaggcacagcagcacacaactgtaatcccagctactcaggaggctgaggcaagaggattgcttaagcccaggagttcaagaccagcctggacaacatagcaagacccccaactcaaaaaataaaaataaatttgaaataagaacattaacatgaaaaaaggttcacaagttgttaagtgaaaaatccgagctacaaaaacattagatacaatttgataacagaatttaacaacttccttaaaaactgaatcacctaaggtgattcaggtgtaagctcacctatttcagtggatttttaacaatgataaatcattttttcaagaaacagctcttttctagaagtgttatttattgtggtttccttttattagatacttaacatcatttacatacacagtttgttctgattcctatttcctatgagatcttaatcttaccaaaccatatttagctaattttgtagattttgtcacttcgagaatgtcatcccttggttgatgacagacaagtttaaatatcaagtgtgtcctatttagtcttccttactagtttctctctcctctaatccacctagcacaaagcatcttttcctaagttataaccccaaccacattagcctaatattcaaggccctcgatagcctgaccccaatttaactttccaactgtaaaatgttctcttttcaaaaataaccctcttcacggcttcctcattcttgcttctaaacttctgctcatactactctttttctcaaagtaccttccttgactccctgacccccatctttatactattagatgaacaaatattcacctaaaccctatgtccactcttctttttttaagtttaaataaagcagtgggagtgaagagggaacaaagaaatctgtacctgattatgatcaatcagttgtaaataccactgcactcgaaccagccctaactccactctttgaaacattacccatgtcccatctcctctgcatctttcctgaacttttaagaacattcatttaccacaccattcatctacatgagcatattacgtaacttatcatgtatctatcttatgtcccatgcaaatgataatcactttaaaggaaagcccctcaacttatatgtttttgatagtacttatcataacaagtgtgactcaaagattaatgataggaattaactaaattctaccttttgagatgaagccacttgaaagcaatgctgaagtttagcaattggtaaggatttagagccaaatgtggaatcaatgaagctaacatcactattgtgcatgccaaaaagatcacagttttaacgcaggtaacggttcacaagaaaccagttttttaaaaacctttttaatgtgagaacagaaatagttattctttactggtctaaattgtgagagagaaaaaccactatttgtggcaccaaaaccaagaatggcatttctctaaagctaggttttattaatcacatactaaatattaaaatgaatatacatttcatgaataaacacaactaaaaaaataagacaaaaaaccgcacaggtcacactgcctacttatctgcaagaaaaattaaaatataagtttaaactgaatttcatcaatttcttttgactctccaaagtacagctctataataaaaatgaaactcaaatgacatgtacctgtgaaccctctgatcacaccttaggacaatgagaggatctatcatcaggtcattctgagtatacttttgttgtcgtacaaactttattgaaggctgaagtgcattaaccgtcattacccatagcctgataagaaaataatcacatgttcaaaacagttttttatatattaaaatctgtagccatccagtcctttctatcttagaaagttatattcagtaaataattagaaaatacatatgaatgaactttgaaaaaatttaagctacagacatctaacctattaaaatatctctttaaaaaacacagagataaaacagtaaacacaaagtagtttcagaaacgttcacagttgtaatggaataatcatggcatataaaattaaaacctgagttaaaaccttagttataccatacttgctatatgactctgtgtaagtcactgaggctctctaaactgtttcctcgtctgtaaaatagaaatgacataatacctgtaaatgaaataagacttgccaaaacattctgtatctagttccataaatataagtcactattctggatttatcatcataaagtctccaagtgagatgccactttgagattagacattaatagattataagtggttactaaaatgactgcacatcataattactaagggttatgcaaatacagaaggtacttgatcttacagtgaagcccaggaatccaccagagaacttccccctcttaaatatgactgtataaacaaggatcatcagacacttaaagaaagcttttactttgaaaaagattaaaatatacaaacagaaaaaaaggaactccaaacagaaaatgtagggataaggagaaaaaaaattttcgaactattaatatcctaaaagaataaagtattttatacatgaaacaagaacaagaggcatttaagaatattcagataacaaagagctcttagaattaagaagaacagggcctgacacagtggctcacacctgtgaaatcccagcactttgggaggctgaggcagaaggttcgcttgagcccaggagttcaagactagcctgggcagcatagtgagacaccatctctacaaaaactaaaaaaaattaggcaggcacgggggtatgcacctgtagtccagctatttgggaggctgaggcagaaggatcgtttgagcccatgagttgaggttacagtgaactatgattgtgccactgcagtccagcctgggtgacaaagcaagaccctgtatctaaaaagtaaaaataaaaaataattttttaaaaaatgaactagaattccacacttaggctaaatatcagtcacatatgagaataattcagcatctcaaaaaagttaagtttaccacactctctttctcaggaagcgagatgagtgtgtgttccattcactaaaacgaggatataaaccaagaaagagaaaaatatggaatccaacaaagaagagtgacaatagcaatttgtcccagatgggaacatgaagacagaaagctctgaaaggaatgtctccaagaaaaaaaaaatagtgtttcttttgtttttttttgagacagggtttcagtggcacgatctcacctcactgaagcctccatctcctgggctcaagcgatcgtcctgcctcagcccaccaagtagctgggaatacaggcatgcatgcaccaccatgccctgctaatttttgtattttttgtagagacggggtttcaccatgttgcccaagctggtcttgaactcctgagctcaggtgatccgtccacctcggcctcccaaagtgctaagattacaggtgtgggccagtgcacccagccaaaaaaatgttaatgatacattatctgatgtgttatgattaagtgtgaagtaaatttcccctcaataatgaagcttggggatgaattagttattggttattgataccaatttaaaaaactgagcaaatagaaaaaaggtattaactaacccaacatatatgttgagtaagggggagggcacttgcataagaatgaaattgtaattaaaggattatcacatagctcaattatgaaaccacttctgtagtcataataatatgcatttgaaatattgctttaacaaaaattttaatatacctgtgttgtgagaaacaggaaaaggggcaatgtgtattagaagaagtgggactcacaggagtggaagcaagtaagagagctaactaaccttcaccttgtagagtagaaagtcaacagataatttctaaattggaaaatcaggaaattacagtcattataagagatatatggggaggatataaataccagaataaaaagataaaagagatgaaaatagtagtctctggggagctaaagtctaaaatacaaaggtgtgaggcagaccttatatactacttaacttgtatactatttatagcccagtattctgttttctagacctgtccaggtgttaaggatccaatctatgaaccagcagagacccaatgactaaagacaaactttgctgcacactgaaatcacctggggaatcttttaaaaagtactgacgcctgactcccacccacaaacagtctgatttaattggcatgggttccaacctggggatcagtagtggtaaaaactctccaggtgattttaatgtgcagcaaaacttggaacaactgcaaagatccaagatataacagtgatctaaatcataattagccacaaataactatacatgataacccaattttcaagaacttcctaaagttagaaatactgtaaggtttctatttcaataaagtttgctttacttaaagatataacaactatttagtagtcttaagaaaggagatatattgtcatatagtcaacaaatactgctatgagtggtgaaaaattttttaaacaattaaatttaggttattgtatattatccctgctatataattatctattacatgtaacaatacactgaatttaccttctaggcatcacagtattaagaaccatccatagtttattgactgtttgcagaattctccgtggaacccctgaattcaatagctggctcatattggatgttaacacttccgcatatggtataagttcactggcagagagtagagtcaagtgttctataatctgcatcacttgtgtgttatttactgggacagctgaaaatgctaaaaagaaaatttagcaatcataacctaaattctgtacagtttatcaagcaggaagtagtagtgttctctcagactatagaccaaacaaatcaagaaaacaatgtggctaaaaagtaactatagttacttgctattgtttcctacagaaacctaggtacaatttcaactaaacttattaaaataagggccagatggatgcggtggctcacacctgtaatcccagcactttgggaggccaaggcgggtggatcacttgaggtcaggagttcgagatcagcctggccaacatggtgaaacccctctctctactaaaaatacaaaaatgagccaggcgtggtggcaggcacctgtaatcccagctacttaggagactgagacaggagaatcacttgaacccggaaggcggagattgcagggagctgagattgcaccagcgcactccagcctgggtgacacagcaagactccatctcaaaaaaataaaaaaataagggccctaagaaaaattcatgcaagtgtagttgttctttcataaagaacaaaaatattttttaaaaatcacattaatgggataggcatggtggctcacacctgtaatctcagcactttgggaggctgaggtaggaggattgcatgagtccagaagttcaagaccagtctgggcaacatggcaagaccacatctctacaaaaagtaaaataattagctggatgtggtggtgtacctgtaataccaggtactcgagaggaagatcccttatgcccaggagacagagtttgcagtgagctgtgttcctgccactgcactccaaccttgagactgggcaacagaccctgtctccaaaaaaaaaaaaaaaaaaaaaaacactttactgacccgaagactaatcttattttcttggtgattcagactgatcttattttttaatttattttttttcattttagagatgggagtcttgctatgttgcccaggctggtctttttttttttttttttttttttttttttccctcttgcctttaccaatcaagagcccaggatggttttgaattcccggcctcaagtgatcctcctgctttggccttccaaggtgctgagataacaggcgtgagtcactgtccagcccagactgattttaaaaacaggactgaaagaggaaaatatgctgaagtattgcttttgatagctaacatttatttgaaaggctcaaacttgaaactttcctccaggtggtccccttataggatgtaagcacccagaagattgctgttactaaaaaatatctagaactatgctctccaataacaactaaccacatctggctattgagcatctgaaataactagtccaaattgaggtgtgttataagtgtaaaatacacaacagattgcaaagactaagtgcaggagtcttagtggggggtaaaatatctcattaaaattttaatattgattacatggtgaaataatattggcaggccaggcacggtggttcatgcttgtaattccagcactttgggaggccaaggcaggcagactgcttgagcccacgagtttgagaccagcctgggcaacatggcaaccctttctctacaaaaaatacaaaaagtagctgggtgtggtggcatgtacctgtagtctcaggtactggggaagctgaggcaggaggattgctagagcatgagaggcaatgagccaagattgcaccactgcagtccagagtaggcaacagaacaaggctctgtctcaaaaaaaataaagaaaagaaaaaatattggccatatttggtcaaataaaatgattatttaaattagtgttgcctgtttctttttcctggaaagtttataggtgttacagctcacattatatataggtgttatagctcacattatatttctatttaacagtgctgatctagaagaacattctccattacatagtcctattccactgcacatatttctttttttgacatggagtctcgctttgtcacccaggctggagtgcagtggtgcaaccttggctcactgcaacctaggcctcccgggttcacaccattctcctgcctcagcctcccgagcagctgggactacaggcgcccacgaccacgcccggctaatttttttttgtatttttagtagagacggggtttcactgtgttaggcaggatggtctcaatctcctgacctcatgatccgcctgcctcggccttccaaagtgctgggattacaggcgtgagccaccacgcccggcctacactgcacttatttctaaccagtttagaacctttctaaaaccacaccacctttttagtgatataatataggacctatgagagaaaagatacaagcacatcagaaagaaatggtaaaaattcctggccaggcacagtggctcacaccttaatcctagcactctgggaggctgaggcaggaggatcactcaaacttacaagttcgagaccagcctgggcaacatggtgaaaccccatctctacaaaaactaaaaaaatcagccaggcctggtggctcacacctgtagtcccagctacttgtgggactcaggtaggaggactgcttgagcccagcaggtggaggctgcagtgagctgagatcacgccactgcactccagcctgggtgacagagagaaagacacacaaacacaaaaggaaaggaaagggaaaagggggaaagggggaaaggagtaaaaggggaaagggggaaaggaggaaaggggggaggggaagggagcataaaattccttaaacgcaaagagtattttatatacttaaaatacattcaccaaaacattgttatatccatgggaaaattctgtatgattataagatttcaattagcctagcatctccttgtactacaaaaggggttaaaggagtatcaataatttactataccttcttggagttgtttgggagaatgatttttagcattattagtcaggagcattcgccgtagcagggcatcagtccctgtgatttcttcttcacaaatccagtcatccacaatacataaatgtgggtagttagtagcaaggagacgtagtaaagctgaatgcaacccttgaaaatttacagaaaatcaattggattcttcatgctcaaacaccagaagcttccccacccctctcatttttatcaagccatcagcccacaaggaaagagggttatgctctaagtcagtgtttctcaaaaaatgattagatggccgggcgcggtggctcatgcctgtaatcccagcactttgggaagccgaggcgggtggatcacctgaggtcaggagttcaagaccagcctggccaacatggcaaaaccccgtatctactaaaaatacaaatattagccgggcgtgttgttgggtgcctgtaatcccagctactcaggaggctaaggcaggagaatcacttgaacctgggaggtagaagttgcagtgagccaggatcgcaacattgcactccagctcaggcaacgagcaaaactcccgttcaaaaataaaaaaagaatgattagagcaccaccagcaccataagcttgggaagcttgtttcatgtgcagaataatgaataccatcccaggtactagatcagaagctctagaatggaggcctaggaatgtgcacttcttgtgcatgcaaactacagtttaagaacttcctgacagtcatttgatcaagggaaactgcttaaatgaagatcctgaagtaatgtgataaacagtgaggtgggaactactacttataaagaaagctttcaactttcttccaccccacccaacataacagtctcctaaagttgtttgacatagcaatggttcaagagttcagggtagaggaaagaaaaggaggagaaaagaatgtccatttggggactatcatatatggtttggaaaaggtcctattcagaaatactgataggcttctgtagagaacatgccctttcctccaaccctgttgagaatcatcactatagatatggtaaaattaaagttgcccactttgaatacctgaaaggtctcaggtactttatgtacgttttctcatctctccctaacattcatacaaagtaagcaatgcctccattctactgtaaggaacaaacaatgctgaaagacatttattaacattaacaaccctaaagtcacacagtcacatatgtcagccaagagaagcagtactgatgatacccacaatggggggcattttttcttggttcaagaagtattaaagaagaccaaaagaaatgggaaaacttgttaccaaatcaaagccttatttataacattttacctataccacagtttgactattcatgactattatgtataatgttaataatgagaggctgtgtgcggtggctcatgcctgtaatcccagcaccttgggagactgagggagatggatcacttgaggccaggagttggagaccagcctggccaacatggggaaatcctgtctctactaaaaatacaaaaattagccaggcgtggtggcacacgcctgtaatcctggctacttgggaggctgaggcacaagaattgcttgaacctgggacgtggaggttgcagtgagccaagatcatgccattgcactccagcctgggtgacagagcaagatgctgtctcaaaaaaaattatgacaccataaaaatgcctatttagttaatgaattaacgaagtactactatgctaagtgcttcacacataagtacctaataaatattgttgctaccatactattatcatcataacagtaagactacgcagtagtagtaggaatcaaagtactttagatctaattatccttttattatgcaaatcaaatgataccactgctttatcccagtagaaacaatacgcaattccgttctcatagaaacagcttaaaattgatgtttctgtgtttgaaaagacatcgtaacaatcaaaaatggcattactttaacatttaaacttctaaatgcatacaggagtatatatacagttaaaactatacccaaccatcacaaaaaagactgcttacaaaagtgtaaactaatcaacatttcatactcttttcaataaagtatatcaattgccaaatgctgttaaaaataacattattttctggaaacagattatacaaagaagccaggcacggtggctcacgcctgtaatactaacactttgggaggctgagtagggctcttcacttgaggtcaggagttcgagactagcctaaccaacatgatgaaaccacatctctacttaaaaaaaaaaaaagattatacaaagacataagtaaatacatgctgcagacatccggttaacgatgagcaatgaaggctcatgtttctccttgaaaccaaccataataaagaaaaaattccggccaggcacagtggctcacgcctgtaatcctagcactttgggaggctgacgtgggtggatcacctgaggtcagttcaagaccagcctggccaacatggcgaaatgaggtctccactaaaaatacaaaaatttagctgggcatggtagcaggagcctgtagtcccagctactcgggaggctgaggcaggagaatcacttgaatctgggagaagaaagttgaagtgagccaagatcgcaccacagtactccagcctgtgagacaagagcgaaactccgtctcaaaaaaaaaaaaaagaaaagaaaaagaaaattccaacttaacagaaagaaaaacacccacactcaaacattaaagaggtatttaattaagaaaaaatctctagaaaattagctgggcgtggtggcataggcctgtagtccccgctactagagagactgaggtaggaggatgtttgagcccaggagtttgaggctgcagttacccactgcactccagcttggataacgtagtgagaccctttccctaaagaaaaaaaaaaagaaagaaagaaaaatatctaatttcaaaaaacactacaatatttctacttaacaggatttatagtaaaaatattacaatatatccatactatggatcataaaacaatcagaaacagtaaggcagatctacctgtactgatatgtaaagatgttcaagactccaagaaaaaaaacaagccttagatgaggcaggggaggccgggcatggtggctcactcctgtaattccagcactttgggaggccgaggtgggcagatcacttgagaccaggagttcaagaccagcctgggcaacatagtgaaaccctgtctctactaaaaatacataaattagacaggcatggtggcgcacatgcctgtaatcccagctatttgagtggctgaggcatgagaatcacttgaacccaggaggtgggggttacagtgagccaagatcatgccactgcactccagcctggatgacagagtgagccactgtctcaaaaacaaaaacaaacaaacaaacaaaagaggtagtgtacaatactattcagagttaaaaaaatttttttttttttacctctgttaagtgtctgttaggttcaaccacaagaacctgctgtttctgtagctctaaattagctgaatatctgcaatttcatacagttcaacctacaggagaaaaaagcctgaaaatacatatcaactgaaaatagctagggttgcgttttagggggcaggctggtttgcaataactgaaataatagatttagtgagggaggcaaagaggaatttcactcttgaactgtttgaatttttaacattaagcacctattacacttcataacattataaacagaaaggttttttaacaataaactttagcagtaaaaagcaaaataaaacatacctcccaactcctgctgcagcccttgagcctgtcgaataaggaatttgataggaatctgatccattaaagaagaagaatatgatttgggctttctttgcatggcagctatcaaagataaaaagtgtaaaataaataaaatgtccagaaacaacagaaatcttaaccttcaacccaaatggaaacaaaaacaaagtcaaattacttttaatgcaattaacctgcgaatatagcatataaaagatgaagaatcattacgaaaacaagtggctacacaggaagaacaagaacatacctggagcaagatctggaaaatgtcctgaaatttaaaactagacagaagaaaattcataacaggttgagagaagccatgtgcaaaagtgccctacactaaaagaaccaacaagtgagtcaagattttccaaaacctaatgacaagatcaaatgtgatcatgaacatatggcctagagcttcatgattccaatgcatcttataaaaagaaactgtaattttatctttttttttttttttttgagacggagtctcactctttttgcccaggctagagtgcagtggcacgatctcagctcactgcaacctccgcttcccgggttcaagcgattctcccgcctcagcctctcaagtagattggctgggataacaggcatccaccaccatgcctggctaatttttgtatttttagtagagacagcattttgcaatgttggccaggctggtctctaattcctgaactcagggggatctagcctgcctcggcctcccaaattgctgggattacaggcgtgagtcactgggcccggccaattttttttttttttttttttttttgagacagagtctcgctctgtcaccaggctggagtgcagtggcgcgatcttggctcactgcaaactctgcctcccaggttcaagtgattctcctgcctcagcctcctgagtagctgggattacaagcgcccaccaccacgcccatctaattttttgtattattagtaaagatggggtttcactgtgttagccaggatggtctcgatctcctgacctcatgatccacccgccttggcctcccaaactgctgggattacaggcatgagccacagtgaattttatcatattatatacaatagtggtgactaaatctttttttttccctgagatgagtcactctgtcacccaggctggtatgcagtggttcaatcttggctcactgcaacctctgcctcctggattcaaacaattcttgtgcctcagcctcccaagtagctgagactacaggtgcccgccaccacgcctagctaatgtttgcatttttagtagagacggggtttcgccatattggccaggctggtctcaaactcctgacctcaggtgatccaccagccccagcattccaaagtacaggcgtgagccatcatatctggcctctttttaaattaagtcaggcaatacgaatttgacttccttctctcacaactcctaccctcaaccagccatgtccaacctttttttcttctaagtccattttaatttctgtacttttgctgctatcctaattcagtgcctactcaccttttgtttaaatatcttctatggcccactttccctgcctccaatttaatccatccttcaacctgcggccatagtcatcttatttaaatagagatttggccaccttcagtgaatcctcagatcacacagagtaaaggtccttgccagtcaatagtatctttctctgtctcatctctactgcattctatatgcctggcacccaaagctcattccaaggtactttcctttacaccacaggaatatatgagaatctcaatcagggtgtttgtaatttcacaaaggatgtacaatgtgtttattctcttacaaactacaaacagtaaagctcaaccatttttcttttattaaggacaagaagtatgtaagtgcaagtgttagaataaaggttgagaatcactgtctatatagaccacatatataccatatactctcatttagatataatctcccttttaagttaataaattagcatagttttccataccaatcttttatgaattaagaaaaaatcagaaggcagttaaaacaatagttataggttccagaaagagataaatcctggttccaatacttattacaatacttaatactaacttagggaagttacttaacttccttgtgcctcagtgttctcccctgtaaaataaacgtaaccacacctatctcagaattgttatgagggtttacatgagttaactataagactaaagtaaggccaggcaaagtggctcacacctgtaatcccagcactttgggaggccaaggtgggtggatgacttgaggtcagaaggtcgagaccagcctcaccaacatggtaaaacccattctctactaaaaatacaaaattcagtggggcgtgttagtgggcacctgtaatcccagctactcaggagtccgaggcaggagaatcactggaacccgggaggtggaggttgcagtgagctgagatcgtgccactgcactctagcctgggcaacacaacaagactctgtctcaaaaaaaaaaaaaaaaaaagactatatgtgcacgattaaaaagcaaaaaattatttcaggttcctagataggaagacttagtactgcaaagacgtaaattctctccaaattaatctataagtttaacataattcttatcaaaatcccaacataattttcatttgtgaaatttaacaaaattattataaagttcatggaaaagattaaatatgtgagaatatacagaaattccaaacaagaactgtatcaaagacacagaaaatgtcaaaacataaaaaagaaaatccaggccgggtgtgatggctcacacctgtaatcccagcactttgagaggctgaggtgtgtggatcacttgaggtcaggagttcgagaccagcctggccagtatgatgaaactccatctctactacaaatacaaaaattagccaggaatgtggtacgcacctgtaatcccagctattcaggaggctgaagcagaagaatcgtttgaacctgagaggcggaggttgcagtgagccaagatcgcaccactgcattccagcctgggtgacagagtgagattttgtctcaaaaaaaaaagaaaaacaaattaaaaactacacacaaaggtcaggaggatcactcacacctgtaatcccagcactttgggaggccaagccaggaggactgctcgagcccaggagtttgagatcagcctggcaacatggcaaatcccatctctacaaaaaataaaaaaaatcagccaggcatggtggtgtccacctgtggtcccagctacactggaggctgaggcagggatcccttgagcccaagagatcaaggctacactgagccatgttcatgccactgcactccagcctgggtgacagagtgagaccctgtctcaaaaaataaatagatgaaatgaactatacacatgtaggaagtataaacacaggtaaaccttctttttcaaatacaggaaaagataccactttataatgatatcatgcatgctaaatctgaccttctgatattatgtgaagtaactaagtttcaaagcccatttcagtgacattctctgtgtgcgtgtgtgtgcgtgcgtgtgtgtgtgtgtgtgtgtgtgtgtggagatgggcatcttgctgttttccaggctggtgtcaaactctgagcacaagtgaccatcccatctcagcctcccaaagtaccaaagtactgagattacagggaatgagctaccatacccagcccaatgttaacggcaaaacgaaactcttcggccaggcgcagtggctcacgcctgtaatcccagcactttgggaggccgaggcaggcggatcacgaggttaggagatgaagaccatcctggctaacatggtgaaaccccatctttactaaaaatacaaaaaaattagccgggcgtcgtagcaggcgcctgtagtcccagctacgccggaggctgaggcaggagaatggcatgaactcaggaagtggagcttgcagtgagccaagatcatgccactgcactctaggctgggcaacagagcaagactgtcaaaaacaaaaaacaaaaaacaaaaaacaaaaaacaaaccaaaacaaaacaaaaaaaaagaaactcttctacttttttttttttttgagacacagtctcactctgtccaccaggctggagtgcagtggcgcaatctcagctcactgcaacttccgcctctgggttcaagggattctcctgcctcaacctcctgagtagctgggattacaggcatgagccaccacacctggctaatttttgtatttttagtagagacggggtttcgccatgttgaccaggctggtctcgaactcctgacctcaggtgatccgcccacctcggcctcccgaagtgctaggattacaggcgtaagccacctcgactggccttttctattgtttttgattaggttgttactctttacactaatggaaggaagaccggtcaaagactcaactcaaatcaagagaaaaaaattcagttacagctccatcaggtgttaaatttatatttagtgaacaagacctatacaattgttaaaatacaggcaattctgttatctattaatttagcctctgataaggaggactgggccataaatcgtggttacataccccaacatacatgatttatgtatcaagtatacaatgcccacattgcaaagattataaaatgatactagagtttattaaaatattgcccttatcaaagaacagtttggaaagtaacaaaatacaagctaataaaataaactaccactagaaccactcctctacgtacaacttacctaaagtcttcgtgtttgctagaagagcctcttcataagacagtatatagtagagcaccaaaagctgtgctgtgatactgaaacgctgattaaggcggatgttgtcaccctggaggtaatattacaaatactctgaaatactctgaatttcacgagtgcttttttttttcttgatagtaaaagaatcaaaatagactattcagcattgctgctcctaactcaggtaaaacaggagaaatgttgctgtgtgtgtattaaactcaaaaaaacaacatgaaatctgagatggcatgagagatgaaaggcaacatgcttaagtggtctttaagataagacaaagaaaagacttcagctactactcaatagcaaacccatcaggctgcttctgaaagacaggagtcccaagtattatatgaaattaccatgaaaaaagtaactcctaaataagacattgtatacttaaatatatttgtgaaaaatgcaactgtttttcccttctaacaaactggggaaaaaatactttcatcaaattttccctgaatgagccaggagcagtggctcatacctgtaatcccagcactttgggaggctgaggcaggcagatcacctgaggtcacgagttggagaccagctggccaacatagtaaaaccctgtctctactaaaaatataaaaattagccaggcgtggtggcaggtgcctgtaatccctgctactcgagaggctgaggcatgagaatcacttgaacccaggaggcagagtttgcagtaagctgagatcgtgtcactgcactccggtcggggcaacagagtgagactctgtctcaaaaaaaaaaaaaaaaatccccctaaatgaatgtaggtgtatcttagattcccaggatgctaaacaaacctatgctgaatatcttgatatcccacacagtacttgatcaaatacacaatctccagggaacccattagactttaaagtgaagcttaaaaaaaaaaaaattactggccaggcgcagtggctcacacctgtaatcccagcactttgggaggccaaggcaggaggatcacttgaggtcaggagtttgagaccagcctactcaggaggctgaagcaggagaatcgcttgaacccaggaagcggaggttgtagtgagccgagactgcccattgcactccagcctgggtgtcacagcaagactccagtctcaaaaaaaaaaaaaaaaaaaaaaaaaaaaggccaggcacagtgactcacacctgtaatcccagcactttgggaggctgaggcaggtagatcacctgaggtcaggagttcgagatcagcctggccaacatggtgaaaccctgtctctactaaaaatacaaaacattagccaggcgttgtggcaggcgcctgcaatcctagctactcgagagactgaggcaggagaatcacttgaacccggcagacagaggttgcagggaggaggaggttgcagtgagctgagatcgcgccactgcactccagcctaggcaacaagagtaaaactccatctcaaaaaaaaaagtgcctgtttagcaaactacttggaactaataccattcttttaatttttagaggtgatctaaggaaatttaatctaattttaaattcagaactacctagaagtcctctgataggaaaataaaaatatgggttaagtaagaagaactaaaagaaaaataagttaatagatataaaagaaccactattttaccccaatgactccttggaaaatattgagtatctcctgttctgtgactggctgatttgtggcttctggattagatttcgacgcaggagtaagtatagaatttatgtacacatcaatcaaaggaagtaattgaggatgaagtggagtagaggtttcacacagctgtctataaatccaatcctaagaaagaatgttatagacactgaattaattgtggcaaaaagaaaaaccaagcaaaattataaaagtacatacagttttacatgaattatgaatcagtaaaactcactattaacttttggcagttccaaatatattatctagtatcataactgcctttgattttaaaatatgaactaccattatatctgtatcatcttaggtgcaccctccactagaagcttgcctttcggtttaatctattagtttttaagtagtgggaaaaacattttaagtccctaccatatctgtatttagagcaccatgtgtgtcgtcatgggagagctcacgttagataggaatttggagagagagagataggtccttcacagcaaaccctcagatagactaagaaaatgtctctgaaaagcacttacaggagacttatcacttaactatcattggatggaggacatgtaaaatgttgggggtgcatgtgaactcttaattcttagctattttacttgctaaaaatataaagcagatgatgcaatctggctggaaaataatctcactaaatcacaaaaaacaagcaacaattaaaaagtgatatatcatgcatatattattcactgttctttgtaaatatctgaaaaagtttcagtctactttacctcctgggtcttaataccttctctttagagggccttttaacttgttagatatagccaactaagacaaatcaaaacatgtcaaaattctaagttaggtgtgaggtgtccttatgacaaatcaacaaatactagtcatggcagcttccccaatttgtaaaacaaaaccaggcccactgcagtggctcatgcctgtaatcccaacacttcgggaggccgaagtaggagaattgcttgagaccaggagttcaagaccagaccagcctgggcaaaatagcgagaccctgtctctacaaaaaaacactttttaaagccaggtatgaggccaggcacggtggttcatgcctgtaatcccagcactttgggaggccgaggtgggtggatcacgtgaggtcaggagtttgagaccagcctggccaacatggtgaaaccctgtctctactaaaaattaaaaaaaaaaaaaaattagccaggcatggtggcaggagcctgtaataccagctactcaggaggcggaagcaggggaatcacttgaacccaggaggcggaggttgcagtgagctgagatagcaccactgcactccagcttgggcaacaaagtgagactccatctcaaaaaaaaaaaaaaaaaaaaaaagccaggagtggtggctcgcacctgtagttccagctacttaggaggctgtggcaggaggactgcttgagcccaggagtttgaggttacagtgagctatgacagcctgggcgacagagtgagaccctgtctttaaaattaaaaaaaaaaattagaaaatggcagtttctaagttttaataaaatagccatgtgccactattgagaatttaaatggagtattatgcattttgaaaatcttacattgttttaaaaatctgaaattactgtataattatataattataattactatccctaattactatacttatataaatgactagtaacttagcttaataccacacatttcctacacaaaacccacaataaatgcctacaaactgaaatacaactggggagaaagcattaatttaggttgttctttgaaatataaatgtaggccaggcacagtggctcacgcctgtaatcccagcactttggtcggttgagacaggcatatcacttgaggtcaggagttcgacaccagccagccaacacggtgaaaccctgtctctactaaaaatacaaaaattagccgggcatggtggcacacacctgtagtcccagctacctgggaggttgaggcaggagaatcactttaacccaggaggcagaggttacagtgagccaagactgcaccactgcactccaacctgggtgactgagcaagactccatctcaaaagaaaaaaaatatatatataaaaatgtaggggcatgcttttattttgttttatttgtaggggcatacttttattgacactttgtgcttggtaaaggaacggctcctgagaagctggtaaatacaatgaataggcaaaaatccagtaatgttggcactcaggttgctggtgacagggacccgaactgcatgagctgtgacaacctaaaagggaaaaatagcattagtaatataatagaactaaatataaaattattttgaaagagagattagtaagtagactgtcaacacctaatacaagtgtggtccctagaaatgaatgatgaaaataaattattacatgttttaattgtctttgaatgctgaggaaatgtacatttagggatttatataattccctaattttttgtttataaacatagatacatacacagtggtgtgataaggtaaaaaaataaaataaaattttgaagcatacaatctgggctcaatgactttgaagaagtcatttatcttctgaatctttttcacatctacaaaacaggacactgccatacctgcctcaaagcattgttatggggggaaaatattctttttggaaaaacatcatatgaactataaagcaccacataaatataaacagaaatatttattctcaatatgtcatgcataggctctaatcgtcttttaaagaccctcttcaaagttgtcttccaattggttcaaatttaaagacaaaaaataacttatgattctcccacatgctgtgtgactacttgtaattcaggagtatatgtgcatatgcgtgttgagggtgggagggatagtaaaatatagaaataaagatattaatagccacaaaaaagcaacaactggccgggtgcagtggctcatgcctgtaaccccagcactctgggaggctgaggtgggtggatcacctgaggtcaggagttcaagaccagcctggtcaacgtggtaaaaccccatctctactaaaaatacaaaaattaggcgtggtggtgtgcacctctaatcctagctacttgggaggctgaggcaggagaattgctccaacccaggaggcagaggttgcagtaagctatgaccataccactgtatactagcctgggtgacaaagtgagataaaaaaaaaaaagaaatgaaaaaaatccttatgcttatccatggacaaaagtgctaaggctaaagaagaacatgttaagtataagaaatttagactctagcctgtaatctagttagaaatgaattttacagcctaaaggtttaaataggacttcattttatctttctccagacacattaaaacaattaccccttgagatgccctaccagcaacatctaagagtattctcctaagtatctactcaaagtctccaaaaatacataaattcaaaagatgccttggtatgttatgactagttttaaaagtgtattttaaatggattattctttaagaaagtttcaaagatgaaataaatcatcatgagtttaaaaagaaaaaagaccatattattttcttaaggtaagacacacaagttttctcccaaagaatattgtaaaagaaagttaaataagtacctaagaataaaaagaaatacctgctcagtaaaaatttcctgtgtgaagattgtcttcatcctgctcaaggagcttggcttaattacaatctaaaattaccaaaagaattccaacagcatgtaaaaatatatgaaacacaatttattctagggaacttatctaaaatggctatgatacacataaatgttcaaatgttcaagtactctactctgttttagaagtgctttcccaaacccaacattaaagtgttaatactcaaaaacagaaccaatataaaaagcacttaataaatactattattggcattttcagtcggttgggggaaacagattatttactacatggagctaggatagctgcccctctgtgaggccaagagaaatatgtgtgtgtgtgtatgtgtgtgtctgtgtctgtatatacgcacatatacacacacaaatatatgtatatatgtatatgtacagatagacacacatacactttttgcacatatcacaccatacaccaaaagaaactccaagtagattaaaatgttcaaatgtaaaacatgaaaccaccaaaaaaaactagaagaaaatataagtgaccacttatataaacccaagaaaggaaaacatttctaagcataagagcaaaatagaaaacacaaaaagaacatttacagccaggtgcagtggttcacgcctgtaatcccagcactttgggaggccgaggagggcagatcacaaggtcaggagatcgacaccatcctggctaacacagtgaaaccccatctctactaaaaatacaaaaattagccgggcgtggcggtatgtgcctgtagtcccagctgctggggaggctgaggcaggagaatggcatgaacctgggagacggagcttgcagtgagccgagatcgcaccactgcactctagcctgggcgacagagcaagactccatctcaaaaaaaaaaaacaaaaaaaaaacatttaatatactacataaaaataataatgataataatttccacatggcgaagttaaatggcaaaaaatactggaaaaagtcaattataacatattgaactctccacttttaaagatactataagatatgtcactgatttaatattacagtagcttttcaagaaaaaagtaggagttggaacactaccactttcatattacatgtcaactgtaaaatgaatcccaatttcaatactgggtaaaatatacgtcttgaaatatatgaagtaagatgtataaggcataatgacatatctttccttttgaatcagtgaaagaaaaaaataaatcaaagtccctacaggaaaattaggatactgatcagcttttcacaaaagaaataaacaagccaaaacacataaattttaaatactaagtttcactagtaatcaaagaaattcaaactaagtgataccactgttcatcaaccaaatttgcaaagattaaaaaaaaatagtaatgctcagtcatgttgaaagtttagaaaaacagtagttcttactaacggtaagagttaaactgatacaatctttcgaaaagataatctgacagtactcatgaaacaccttaacatagtcatacacttttccttagcaattaccttctagaaatttatcctaagaaaataatccaacaggtgtatgaagagatacatgtgggtgcctatgtgtgtatttacataaacaaggacattcctctaagcattatacagaaactagaaaatctacatgggaaataataagggacctattaagaagatcaaacaatggactataagacaatgcagtcattaaaaattatactgtattataatatttattgatatgagtaaatgctcatcatatattaatttttttaaatcatcaaatatgtacgtcactttaaagaaagaacagacatcagaatattaatagtagtatactaggtatctctgaatcatggaattataagatatctttcccttttctgtgctttccaaggtttttgcatgagtatctattattttagtaaatacaggtttcaaaatgcatttttctaagcgctcttgataaaacttctattaaacaattaaaattacttaaatgaaaacaatctatttacactacaacaaaatgtccagcttagaaacacctttttttttttagaaagaagttaaaagaaaattaccttcatccccaaagtggaacagaccaagtcaatgatagcactaagctggttgctgtgaaagtacatagccaccaataataacatctccccaaaagaagcagagacgcctgaagtactgtcaaaacaaaataggaaatatgaattttccaaagagagaagaagaaaagctttctcaactaactaaatcaaattatcttacctctcaaaatacgcttcttcttttatcatccaacttagccacaccaccatcagctgctcctgttcaggtgtactatataaaatataccagaatgtcactggtttaaattagatatactagcatatgaataaaaagcattctgaagttatttttggtagaaattatttttcctgccctattttcaagtatcaagtcaaattaaaggcttgctgaattgggccattaattgtcattgaggtatgaagtaattctagagctcaagaatgaggacctttgctttttttcatggatcccctctcaaagtcttagttactgccttcacaggttggaaagagtaagattcttcacattccttagaaaacaaaggccccttgggattaacttgttaaaacaactacacaacagctgatatttatttcatatagaaaaaaatctagtgttaacacttaagcatcaaaatatcacaaactgagtgccaaacagtaatgagcagtccatcttctggaaaaatgaaatttaatttatagaaaccttatgagtagatctcaaagttacagagaaataaatgatcactaatcatgggaaaaaaggcagtcacaggcttaccagatatgaaaaatggctataaaaatacgacttttctttgagacaatgtcttgctctgtcgcccaggctggagtgcagtggcgcaatcatagctcactatagcctcgaccacccaagctcaagtgatcctcccacctcagcctcccaagtagttgggactacaggcatgcgctactgcatccagctaatattttttatttttagtagaggggaggtctcactatgttgcccagtctggtcttgaactctcgagctcaagtgatacgcctgcctaagcctcccaaagtgctggaattacagaggtgagccaccatgcctagcctaacaatgactttttaaagggaattcctaaattctgagatggagtttcactctcgttgctcaggctggagtgcagcagcgcaatctcagctcactgcaacctccgcctcccgggttcaagcgattctcctacctcagcctcccgaatagctgggattacaggtgtctgccaccacacctggctaatttttctatttttagtagagatggggtttcaccctgttggccaggttggtcttgaactcctgatttcaggtgactgacccgcctcagcctcccaaagtgctgggaatacaggcctgagccaccacacccggtctaaattttaattgaaaagtacaagctgacgttgacttgtgaaaattttttcaccaatctctttccacttcagtgcagtaaaaatagatgcaacaaaaagcaaatgaaaagtataattcttctattaccaaaagctaagaaaataaaaaaggtcattctcaactatacctaaaccatataacaaataataaagtgttatgtagtagaaagattacagcctttacagcctaccacatctgagtgagaatcccatctctgctaattactggtagtgtgatcttgaagaagaaacacaaataatctttcttttcctttttcactgtagctctcaaatgttaagaactttttttttgtttttgagaagtttcgctcttgttgcccaggctggagtgcaatgacacaatcttggctcactgcaacctccacctcccggattcaagagattctcctgcctcagcctcccgagcagctgggattacaggtgcccaccaacacacccagctaattttttatatttttagtagagacggggtttcaccatgttggccaggctggtctcgaactcctgacctttaggtgatccacccaccttggcctcccaaagtgctgggattacaggcatgagccactgtgcctggcctatcttaaggacttttaagtatctttctaaacattagtttttctatctataagatatagacaaaaataccttataaggctgggcacagtggctcttgcctgtaatcccagcaatttgggaggacaagacaggaggatagcttgagcccagcagttcaagaccagcctgagcaacaaagtgagatcccatctctacaaaaaaatttaaaaattagacaggcatggtggcgcatgtttgtagtcccagctacacgggaggctaagatgggaggatctcttgagcccaagaggccaaggctgcagcgagccctgatcgtgccactggactccagcctgcgaaacaaagcaagatcctatctaaaaaaaaaaaaaaaataccttataagagtaatgaggatttgagataatgtttagaaagtacttcaagtaaaaagaaaagaaagaattcatgtacctaattttacaccatcctgaaactccattaaagctacattaaagggattttcttaaaaggcataaacgcataagatattgaggagggacaacaccacaaaatactggaagctagagaatatatagataaatggaaacggactcagcagacctgaggaagcaaaatgctaaactggtagaagagaaaacccatccattttataccacggaattcccaaagggctcaggctactccaggcagttccaggactgagagtgaagacagactaaaattaagaggttgacattctatataagtagtagacctccaaatcacctcctgcattctgcacaactagaagaatacccttccctcagcagagagaagactggagatttattgtctggaggtggtaaaatcatgcatctgaattaagggacaaccaggtatatctggagcaccattctgaaagtaggagaattaagtaaacgattatactgcaggctgatatctaccagcccttaaccctcactctttaactttgtttatgggtttctgtataggtcttccctctccaggccagacaataatctttagaactctgatcagcccaagagtttcccaaagacccacttatgcattagaggttctaatatgctttttcatttcctagtcttaaatatgaacaatcggccagacgtggtggctcacacctgtaatcccagcactttgggaggccaaggcaggcagatcacctgaggtcaggagttcgagaccagcctgaccaacatggagaaaccccatctccactaaaaatacaaaacttagctgagggtggtggcacatgcctataatcccagctactcgggaggctaacacaggacaatcacttgaacccgggaggcagaggttgcggtgagccgagatcacaccattgcaccatgggcaacaagagcaaaactctgtctcaaaaattatatttatatatgtatatgaacaattaatattggctgggtgtggtggctcacacctgtagttacagcactctgggaggcaaaggcaggaggatcaccttaggccaggagttcaaaatcagcctgggcaacaaaagtgagaccccatccctacaaaaaacttttaaaaataagccaggtgtggtggcccacactggccacttgggaggctgaggtggaaggatctgttgaccccagaagttcaaagctgcaatgagttatgactgtaccactgagtttgccccgagcaacagagagagcccccatctctaaataaataaataaatagaaatttaaaaataataataaatattaagtatctgagaaaagcttctaactttaaaaatagagacccaaaaaaggcagggaaaaaaagcagcttagagaaaagaagcaatacaaataataaaatctcttcaaaatcagtatgactaatatcaaagaaattatgctataatgaaccaatagacactacaaagaagaaacattcagagagccaaaaaagcactcttagaaattaaagactgaataggaattgaagataaagttaaagacaaatcctaaaaggcagaatgatttcttttttttttttttttttttttttttttttttttttttctgagatgcagtcccgctctgtagcccaggctggagtgcagtggcgcaatctcggctcactgcaagctctgcctcccaggttcacgccattctcctgcctcagcctacaggactgcaggcgcccgccaccatgaccggctaatatttttttgtattttttttagtagagacggggtttcaccgtgttagccaggatggtctcgatctcctgacctcaggtgatccacctgcctcagcctcccaaagtgctgggattacaggcgtgagccagtgtgcctggccattttgctccttcagaatgggtatgtgtgaagtaaattctttttgagactgggtatttctgaaaatatctttgtcctactttgacatctgattgatagtttgatggggtatggaattctaagttggaaataatttcctttcaggactttgaaggtgttgcttcattgtcttctaacttccagtgttgtcaggaagtctgacattctgattcctggtcctttgtgtggcctatttgtttttaatatagaaactcgtaggattagttttttatccctagggttttgaaatttctggatgatatgccttagcctgagtctctttttgactattgtcctaggcattcagtaagccctttgaacctggaaactcatgtctctcagttctaggaaattttcctgaataaatttgttggtaatgttttcttcttgggtgttctgtctaaaacctccttttatttggaattggactttttgaaatgattgtcgtattttcttatcctttcctcttttccttcccctcaatcttgttctactttttagaaaacagctttattgagatgtaatatacataccataagatttacccaaagtgtacaattgagtggtttttagtgtatatacagagttatgcaaccaccaacacaacagaattttagaacctgttcagcactctaaaaataacttgctcattctaagaccaggtacagtggctcacccctgtaaacccagtggtttgagagactgaggtgggaggactgtttcaggccatgagtttcagactagcctgggcaacacagcgaaacactgtctcttaaaaaaaaaaaattctccaggggtagtggaacgtgccttagtcccagctatttgggaggttcaaggagaaggatcacttcaacccaggagttcaagattacagtgagctatgattgtgccatagcactacagcctgggtgaaagagcttaaaaaaaaaaaaaaaaaaaaaacagaggctgggcacggtggctcacgcctgtaatcccagcactttgggaggccgaggcgggtggatcgcgaggtcaggagatcgagaccatcgtggctaacatggtgaaaccccgtctctactaaaaatacaaaaattagccgggcgtggtggcaggctcctgtagtcccagctactcgggaggctgaggcaggagaatggcgtgaacctgggaggtggagcttgcagtgagccaagatatcgcaccactgcactccagcctgggcgacaaagctagactccgtctcaaaaaaggaaaaaaaaaaaaaaaaaaagaaagaaaggataggttttctttttaatttttttttttttaaacaaagacaggagtcgcactatgttgccccagctggcctcgaactcatagcctcaagcaaccctcccgcctcagcctcctgagtagctgggactacaggtgtgagccaccacgcctgggtaatatgatgatatgagatataagaaacagaagatccaacaaaggagagatgaagcaagtctccaaaatgatggtgaaggtcaatcccaggatgagagctttatactaccaggtatacctggtaaccattccagaccaaaatgctcctgaagaaatctcctcaagaagatgaaactcacagactgtctaatgagtcaaaacatctggagagaagatttaggctggcagagagtttgaggttacatgaatggtacatataacaccaagaaagttaaaagcaaaaaacaaaaacacaggataaatattaatccaaaaaaaaaaaaacaagttttacaaggaagtaaaaaataatcatatactgcatggttgagttctcagtagtgcttacataatcataacaactatatattgatctaatctaaattataaccatactaggagaatgagaggataggaaggacatgtatggatgtgtttaggacagggagaaaaaagacagagaactaatttctcatctttcatactgggaactcaataaaaaatacctaaaagcaaaaatcaagaggtatcaaatacaaacatattattacagatgtagcagtaaaacacaaaataaacagctaaaagaattgaaagacactgcttctaagaaagataaaataggaaggagagaaggaaggactgctatttgccttaacaaatcctgaagaactatttcgacttatttaaacaatgtacatatataagataaataaaatgaatcagatgctactgatatccttattttaaaaaaatacaaataagctgggccagtggcatacacctgcagtcccagctacttgggaggctgagtcaggaggattatttgaggccaggagttcaaggctgcactgtgctatgatcatacccatgaacagccactgtactccagcctgggcaacaaagctagaccccttctcttaaaaattggaaaaaacaaaacaaaactacgactgtccatacctagaccagcttttgtagaaaactcttatctaatgctatacaattttattgagtaaataaaagtaaaccttgagaaaatggagcaacttatatagttaggtacctgacaagtgtagaaaaggccagtagcatacaaaaggaaagtgaaacaaagcgaaccccagctggcgtagcaggaggacggctcgtcatcaactgcagtaattgctcagcttcttcttcagttggtctaaaaaggaatacatcattaggctttacatttttagttgggatgaagaagaaaaagtgaatttttaaccttttagttacaaattttaaactttataatggtatcttgctatttataaaatctttaacatctcaagttgccaaatgcaaaactgttgagaaattacaactacagtgttttactgtggacacaaatacaggcaggtcctccctttgccctgtagtgtgagaccataaaaatgaccatgcaagctgaaatcatgcaacacaatcttaataatcaatggtgaaaagtatggttgtactgtagcctttaaaatttttgtcaaaacattaaaaactctgttgattataatgcataattttttttttttttttttgagacaaggtcttgctccatcgcccaggctggagtgtagtggcaggatcagagctcacttcagctttgaccttccaggctcaggtaatcctcccacgtcagtcctcatgtagctaggaccacaggtatgcgccaccatgcccagcttattttttttagtagagacagggttttgccacgttccccaggctggtctcagactcctgggctcaaaaaatccacctcccttggtctcctaaaatgctgggattacaggtgtaagtcactgtacccagccaggaatttttttttttaaatggtaaaactaatatttttatagtactctaattgaaaatattagaaacattgggaattaaactgttttctttctttcttttttttgagacagagtctcaccctgtcgcccaggcgggagcgcagtggcacaatctcggctcactgcaaactctacctcctaagttcaagcaattctcctgcctcagactcctgagtagctgggactacaggcacacgccatcattcccagctaatttttgtatttttagtagagagagggtttcaccatcttgaataggttgtcctcgaactcctgacctcactgatccacaagccttggcctcccagagcgctcggattatgggcgtgagccactgtgcccggtcttaaagtttttttatttcttcgtaaagactttatcaagagtagtttaaacagcctttgcctccttttttttatgttttttgtttttgtagagatggagtttcactcttattgcccaggccggactgcaatggtgcaatcttagctcaccgcaacctccacctcctgggttccagtgattctcctgcctcagcctcccaagtagctgggattacaggcatgtgccaccacacccagctaattttgtatttttagtagagacagggtttctccatgttggtcaggctggtctcgaactcccaacctcaggtgatctgtccaccttggccccccaaagtgctgggattacaggcgtgagccaccgcgcctggcctatgctttcatctttattggccaactgtctcttccaattatctgtttttggaatataatgttccaaaaactgtttccatgttttggaacatgagttcattatggagagaaaggaagcaatacaggttgagtaaccccaatccaaaaaacctaaaatctgaaatgcccccaaactccaaaacattctgagtgccaatatgaggtaatgagctcaaaggaaatgctcattggagcattaaggattttgaatttctgttagggatgctaaatcggtaaatataaacattccaaaatccgaaaagttctaaaatcccaaacgcttctggtctcaagcatttcagataagggatattcaacctttacaactacctcctctgctatatgtacatgaatcaaataacaggtgtgcagtaaccagctaccgacagactttgaaagaagtgaggccattggtcactaaccatgatgtacatctgttatttacttagtgatctgtgtcctgaggagctcacaaactctatacaattaactggttaatgtatcatggcaactgaaatggcaactgtgttgagagaccagcattatttaaataaactggcgtaactgaaactcatgcatattggagacatgcaaatgaggactgtatgtacaattattaagaacactattcaaaaggattttgtatggtgactaagaaacattgtactggccaggcacagtggctcatgcctgtaatcccagcactttgggaggctgaggcaggcagaacacctgaggtaaggagttcaagacaagcctggccaacatggtgaaaccccgtctctactaaaaatacaaaaaaaaaaaaaaaaaaattagccgggtgtggtgaggcaggagaatcgcttgaatccgggaggcagaggttacagtgagccgagatcacaccactgcactccagcctgggcgacagacggagattccatctcaaaaaaaaaaaaaaaaaaaaacattgtacttattaatcacatcatattaattttaaacaattatgatatcagctgtaaaaggaaacaaaggagagatttacttcaactagtcaatggtaaaagatcactcacagatcattcactatagttttgtcaagctgtgttgaaatcacaggtttctttaaactgtgattggaaattgataaactgctctggctcctcccatatttatatagttctgtttacaatcagaacaaaatagatgaatacatctctgctagaaattcttggccttaggatttcattcttcttacaggccagcccactacctgagtccaacagaaaactttaatcctctgaataaaaggcctttggctcactttcttgagaatagaaacaagaaggtaaaatgacaaaaaggtaaaatatcaaactattgaatacttgagtccagcgatccccatcaaagcacagtacagacgtaagagtgcactggctttcacaacatgctcttctttcagccccgaatacacagacacattgggctccatatccacatcagcttcttccacaattcgggtgcttcttactgtgggaagaatgcccatcaactccagaagaagctgccttctcatctgccaaaggacagaactgctggtctctctttttctctgaaagaaatatggatcacaaaaggaagaaagcatgaagcatttactaaactaaaagggagctaaaacatagcaccccacttaaacactttcaaattggcctatttgaagagattgtcgtgactacagaatctcattttaaccaatcaagcaaactcaaaatccactagtttgtctgaagaatgaatattcaccataatttggattggttgcagaggaaagactaaattagtgacaatttgaattgtggaatattatttcaatggtactttcaaatacataaagactaacaaagtgatatgtggtataggagaaaatgctcagattttgaagacgtaagttcttggggtttaaatgccagctctactattagacgattatatacctttaggcacattggttagcctctctgaaccccaatttccttaatgacaaggaaatattttatcaacaatatttaccttatagaactcctataattaagagtttacaattcttggcctgatgcagtggttcacgcctgtaatcccagcactttgggaggccaaggcggacggatcacttgaggtcaggagttcgagaccagcctggccaacatggtgaaaccccatctctactaaaaatataaaaattagctgggtgtggtggtgcatgcctgtaatcccagctacttgggaggctgaagcacaagaatcgcttgaacccaggaggcggaggttacaatgagtcaagatggcgccactgcactccagcctgggcaacagagtgatactctcgtctcaaaaaaaacaaaagagtttacaattctataaccactacagttcttcaggcagggacaatgccttagtcttctctcactctgcacagtcgaacattgtgcctaacatacagcaagcactcaaagtctgttaagtagatgaatgaacagagataatacatgtatgaaagcagttctaaactatacagggctagacaaatgttaattattatcttttgagtgtctctaagtaaaatatgatagacctgctttaataataacagtaagttcaaagaataaaggtttattgaatacaaaagacaactacaaacaagatgagcatgccaagtgcttaaggcagtacctgacatatatgaagcatccaataaataaatgttaactttgttttaaaaagcagagcttaaaatcagttttcaaatgggctataaaatagaacttgaatattttaaaaaactatgattcagtagcttaaaaatagactacaggatctaagcagtatacatgttgtctagctaagtgacctcaacgagttaaatcgcaatctgcattagctccttcataggaactctattcacatagttaatataaattagtttttgaaaaattaaaacattttgcaagttaaaaactgttgcaaaatacatatgcataagcaggtgaacgtataaaataaaatgtggtatatacacacaatggaatattatttttctttttttttgagaccgagtcctgctctgtcaccaggctggagtgcagtggcgtgatctcggctcactgcaacctctgcctcccatgttcaagcgattctcctgcctcagcctcccgagtagctgggactacaggcacgcacatcacgctcagctaatttttgtatttttagtagagacagggtttcaccatgttggccaggatggtctccctctcttgaccttgtgatccgcccgcctcagcctcccaaagtgctgggattacaggcgtaagccaccccacc
